(19) United States
(12) Patent Application Publication
(10) Pub. No.: US 2003/0224364 A1
(43) Pub. Date: Dec. 4, 2003

(54) Compositions and methods for identifying and distinguishing orthosomycin biosynthetic loci

(76) Inventors: Chris M. Farnet, Outremont (CA); Emmanuel Zazopoulos, Montreal (CA); Alfredo Staffa, Saint-Laurent (CA)

Correspondence Address: George A. Loud, LORUSSO & LOUD, 3137 Mount Vernon Avenue, Alexandria, VA, 22305, US

(21) Appl. No.: 10/107,431

(22) Filed: Mar. 28, 2002

Related U.S. Application Data
(63) Continuation-in-part of application No. 09/769,734, filed on Jan. 26, 2001.
(60) Provisional application No. 60/279,095, filed on Mar. 28, 2001.
(60) Provisional application No. 60/279,709, filed on Mar. 30, 2001.
(60) Provisional application No. 60/285,214, filed on Apr. 20, 2001.

(51) Int. Cl. C12Q 1/68; G06F 19/00; G01N 33/48; G01N 33/50

(52) U.S. Cl. 435/6; 702/20

(57) ABSTRACT

The invention provides compositions and methods useful to identify orthsomycin biosynthetic gene clusters. The invention also provides compositions and methods useful to distinguish everninomicin-type orthsomycin gene clusters and avilamycin-type orthosomycin gene clusters. An orthosomycin gene cluster may be identified using compositions of the invention such as hybridization probes, PCR primers derived from specific protein families responsible for the unique structural features that distinguish orthosomycins, everninomycin-type orthsosomycins and avilamycin-type orthosomycins. An orthosomycin gene cluster may be identified using compositions of the invention such as the sequence code for the reference sequences stored on computer readable medium.

### CROSS-REFERENCE TO RELATED APPLICATIONS

[0001] This application claims benefit under 35 USC §119 of provisional applications U.S. Ser. No. 60/279,095 filed on Mar. 28, 2001, U.S. Ser. No. 60/279,709 filed on Mar. 30, 2001 and U.S. Ser. No. 60/285,214 filed on Apr. 20, 2001 which are hereby incorporated by reference in their entirety for all purposes. This application is a continuation is part of U.S. Ser. No. 09/769,734 filed on Jan. 26, 2001 and claims benefit under 35 USC §120 to U.S. Ser. No. 09/769,734 which is hereby incorporated by reference in its entirety for all purposes.

### FIELD OF INVENTION

[0002] The present invention relates to the field of microbiology, and more specifically to genes and organisms involved in the production of orthosomycins.

### BACKGROUND

[0003] Orthosomycins are oligosaccharide molecules containing two orthoester saccharide linkages. The general structure of orthosomycins is illustrated below. The saccharide residues in the above orthosomycin are labeled A-H and the key features of orthosomycins, the orthoester linkages are indicated below.

[chemical structure]

[0004] Known orthosomycin compounds can broadly be classified into two classes: (1) the everninomicins that contain an amino- or nitrosugar residue in the terminal position of the oligosaccharide chain, i.e. wherein R is evernitrose in the above molecule; and (2) the avilamycins, curamycins and flambamycins that do not contain an amino- or nitrosugar residue in the terminal position, i.e. wherein R is hydrogen in the above molecule. Within the second class of orthosomycins, the avilamycins and the curamycins differ only in the nature of the acyl side chain found in ester linkage to the C45-hydroxyl group of sugar residue G. Neither the avilamycins nor the curamycins carry a simple methyl group on this hydroxyl. In the everninomicin class, the hydroxyl is generally O-methylated. Flambamycins differ from the avilamycins only at position C23 of sugar residue D, which is a methylene carbon in the avilamycins but carries a hydroxyl group on the flambamycins. The everninomicins may or may not carry a hydroxyl at this position.

[0005] Many known orthosomycins have antibiotic activity. There is an urgent need for new anti-microbial agents given the emergence of bacteria resistant to conventional antibiotics. The oligosaccharide class of antibiotics has demonstrated a wide spectrum of antibacterial activity against gram-positive organisms, including methicillin-resistant Staphylococcus aureus, vancomycin-resistant enterococci, and penicillin-resistant pneumococci. It is therefore desirable to develop a means to identify new orthosomycin natural products. Orthosomycin-producing microbes represent an important source of new antibiotics. Accordingly, it is also desirable to develop a means to identify orthosomycin-producing organisms and to distinguish between the classes of orthomycins produced by such orgamisms.

[0006] Existing screening methods for identifying orthosomycin-producing microbes are laborious, time-consuming and have not provided sufficient discrimination to date to detect organisms producing orthosomycin natural products at low levels. There is a need for improved tools to detect orthosomycin-producing organisms. There is also a need for tools capable of detecting organisms that produce orthosomycins at levels that are not detected by traditional culture tests. There is also a need for tools that discriminate between the classes of orthosomycin molecules such as avilamycin and everninomicin classes of orthosomycins.

### SUMMARY OF THE INVENTION

[0007] The invention provides compositions and methods useful to identify orthsomycin biosynthetic genes. The invention also provides compositions and methods useful to distinguish everninomicin-type orthsomycin gene clusters and avilamycin-type orthosomycin gene clusters. Once target orthosomycin genes are identified, a full length or partial biosynthetic locus for the orthosomycin compound may be isolated according standard methods.

[0008] In one aspect of the invention, an orthosomycin gene cluster is identified using compositions of the invention such as hybridization probes or PCR primers. Hybridization probes or PCR primers according to the invention are derived from protein families responsible for the unique structural features that distinguish orthosomydns, everninomycin-type orthsosomycins and avilamycin-type orthosomycins. To identify orthosomycin gene clusters, the hybridization probes or PCR primers are derived from the nucleic acid sequences corresponding to the seventeen protein families GFTE, GFTG, GTFH, HOXG, MTFD, MTFE, MTFF, MTLA, MTIA, OXRV, OXRW, OXRW, PHOD, UNAJ, UEVA, UEVB and UNKU. To identify everninomicin-type orthosomydn gene clusters, the hybridization probes or PCR primers are derived from the nucleic acid sequences corresponding to the nine protein families DACT, DEPF, EPIM, GTFA, MTFG, MTFV, OXBN, OXCO and UNBB. To identify avilamycin-type orthosomycin gene clusters, the hybridization probes or PCR primers are derived from the nucleic acid sequences corresponding to six protein families ABCD, DEPN, MEMD, REBU, UNAI and UNBR.

[0009] The invention provides compositions for use in identifying orthosomycin biosynthetic genes, orthosomycin gene fragments, orthosomycin gene clusters or orthosomycin-producing organisms. In one aspect, the invention provides an isolated, purified, or enriched nucleic acid comprising one of the sequences of SEQ ID NOS: 52, 54, 56, 58, 60, 62, 64, 66, 68, 70, 72, 74, 100, 102, 104, 106, 108, 110, 112, 114, 116, 124, 126, 128, 130, 132, 154, 156, 158, 160, 162, 164, 166, 168, 170, 172, 174, 176, 178, 180, 194, 196, 198, 200, 202, 204, 206, 208, the sequences complementary thereto, or a fragment comprising at least 10, 15, 20, 25, 30, 35, 40, 50, 76, 100, 150, 200, 300, 400 or 500 consecutive bases of one of the sequences of SEQ ID NOS: 52, 54, 56, 58, 60, 62, 64, 66, 68, 70, 72, 74, 100, 102, 104, 106, 108, 110, 112, 114, 116, 124, 126, 128, 130, 132, 154, 156, 158, 160, 162, 164, 166, 168, 170, 172, 174, 176, 178, 180, 194, 196, 198, 200, 202, 204, 206, 208 or the sequences complementary thereto. In another aspect the invention provides the above nucleic acids for use in identifying orthosomycin biosynthetic genes, orthosomycin gene fragments, orthosomycin gene clusters or orthosomycin-producing organisms. The isolated, purified or enriched nucleic acids may comprise DNA, including cDNA, genomic DNA, and synthetic DNA. The DNA may be double stranded or single stranded, and If single stranded may be the coding or non-coding (anti-sense) strand. Alternatively, the isolated, purified or enriched nucleic acids may comprise RNA.

[0010] The isolated, purified or enriched nucleic acids of one of SEQ ID NOS: 52, 54, 56, 58, 60, 62, 64, 66, 68, 70, 72, 74, 100, 102, 104, 106, 108, 110, 112, 114, 116, 124, 126, 128, 130, 132, 154, 156, 158, 160, 162, 164, 166, 168, 170, 172, 174, 176, 178, 180, 194, 196, 198, 200, 202, 204, 206, 208 may be used to prepare one of the polypeptides of SEQ ID NOS: 51, 53, 55, 57, 59, 61, 63, 65, 67, 69, 71, 73, 99, 101, 103, 105, 107, 109, 111, 113, 115, 123, 125, 127, 129, 131, 153, 155, 157, 159, 161, 163, 165, 167, 169, 171, 173, 175, 177, 179, 193, 195, 197, 199, 201, 203, 205, 207 or fragments comprising at least 5, 10, 15, 20, 25, 30, 35, 40, 50, 75, 100 or 100 consecutive amino acids of one of the polypeptides of SEQ ID NO: 51, 53, 55, 57, 59, 61, 63, 65, 67, 69, 71, 73, 99, 101, 103, 105, 107, 109, 111, 113, 115, 123, 125, 127, 129, 131, 153, 155, 157, 159, 161, 163, 165, 167, 169, 171, 173, 175, 177, 179, 193, 195, 197, 199, 201, 203, 205, 207.

[0011] Accordingly, present invention also provides an isolated, purified or enriched nucleic acid which encodes one or the polypeptides of SEQ ID NOS; 51, 53, 55, 57, 59, 61, 63, 65, 67, 69, 71, 73, 99, 101, 103, 105, 107, 109, 111, 113, 115, 123, 125, 127, 129, 131, 153, 155, 157, 159, 161, 163, 165, 167, 169, 171, 173, 175, 177, 179, 193, 195, 197, 199, 201, 203, 205, 207 or fragments comprising at least 5, 10, 15, 20, 25, 30, 35, 40, 50, 75, 100 or 150 consecutive amino acids of one of the polypeptides of SEQ ID NOS: 51, 53, 56, 57, 59, 61, 63, 65, 67, 69, 71, 73, 99, 101, 103, 105, 107, 109, 111, 113, 115, 123, 125, 127, 129, 131, 153, 155, 157, 159, 161, 163, 165, 167, 169, 171, 173, 175, 177, 179, 193, 195, 197, 199, 201, 203, 205, 207. In another aspect, the invention provides the above nucleic adds for use in detecting orthosomycin biosynthetic genes, orthosomycin gene fragments, orthosomycin gene clusters, or orthosomycin producing organisms.

[0012] The coding sequences of these nucleic acids may be identical to one of the coding sequences of one of the nucleic acids of SEQ ID NOS: 52, 54, 56, 58, 60, 62, 64, 66, 68, 70, 72, 74, 100, 102, 104, 106, 108, 110, 112, 114, 116, 124, 126, 128, 130, 132, 154, 158, 158, 160, 162, 164, 166, 168, 170, 172, 174, 176, 178, 180, 194, 196, 198, 200, 202, 204, 206, 208 or a fragment thereof or may be different coding sequences which encode one of the polypeptides of SEQ ID NOS: 51, 53, 55, 57, 69, 61, 63, 65, 87, 69, 71, 73, 99, 101, 103, 105, 107, 109, 111, 113, 115, 123, 125, 127, 129, 131, 153, 155, 167, 159, 161, 163, 165, 167, 169, 171, 173, 175, 177, 179, 193, 195, 197, 199, 201, 203, 205, 207, or fragments comprising at least 5, 10, 15, 20, 26, 30, 35, 40, 50, 75, 100 or 150 consecutive amino acids of one of the polypeptides of SEQ ID NOS: 51, 53, 55, 57, 59, 81, 63, 65, 67, 69, 71, 73, 99, 101, 103, 105, 107, 109, 111, 113, 115, 123, 125, 127, 129, 131, 153, 155, 157, 159, 161, 163, 165, 167, 169, 171, 173, 175, 177, 179, 193, 195, 197, 199, 201, 203, 205, 207 as a result of the redundancy or degeneracy of the genetic code, for use in detecting orthosomycin biosynthetic genes or orthosomycin producing organisms.

[0013] The invention provides compositions for use in identifying everninomicin-type orthosomycin blosynthetic genes, everninomicin-type orthosomycin gene fragments, everninomicin-type orthosomycin gene clusters, and everninomicin and orthosomycin-producing organisms. In one aspect, the invention provides an isolated, purified, or enriched nucleic acid comprising one of the sequences of SEQ ID NOS: 210, 212, 214, 216, 218, 220, 222, 224, 226, 228, 230, 232, 234, 236, 238, 240, 242, 244, the sequences complementary thereto, or a fragment comprising at least 10, 15, 20, 25, 30, 35, 40, 50, 75, 100, 150, 200, 300, 400 or 500 consecutive bases of one of the sequences of SEQ ID NOS: 210, 212, 214, 216, 218, 220, 222, 224, 226, 228, 230, 232, 234, 236, 288, 240, 242, 244 or the sequences complementary thereto. In another aspect, the invention provides the above nucleic acids for use in identifying everninomicin-type orthosomycin genes, everninomicin-type orthosomycin gene fragments, everninomicin-type orthosomycin gene dusters and everninomicin-like orthosomycin producing organisms. The isolated, purified or enriched nucleic acids may comprise DNA, including cDNA, genomic DNA, and synthetic DNA. The DNA may be double stranded or single stranded, and if single stranded may be the coding or non-coding (anti-sense) strand. Alternatively, the isolated, purified or enriched nucleic acids may comprise RNA.

[0014] The isolated, purified or enriched nucleic acids of one of SEQ ID NOS: 210, 212, 214, 216, 218, 220, 222, 224, 226, 228, 230, 232, 234, 236, 238, 240, 242, 244 may be used to prepare one of the polypeptides of SEQ ID NOS: 209, 211, 213, 215, 217, 219, 221, 223, 225, 227, 229, 231, 233, 235, 237, 239, 241, 243 or fragments comprising at least 5, 10, 15, 20, 25, 30, 35, 40, 50, 75, 100 or 100 consecutive amino acids of one of the polypeptides of SEQ ID NO: 209, 211, 213, 215, 217, 219, 221, 223, 225, 227, 229, 231, 233, 235, 237, 239, 241, 243.

[0015] Accordingly, the present invention also provides an isolated, purified or enriched nucleic acid which encodes one or the polypeptides of SEQ ID NOS: 209, 211, 213, 215, 217, 219, 221, 223, 225, 227, 229, 231, 233, 235, 237, 239, 241, 243 or fragments comprising at least 5, 10, 15, 20, 25, 30, 35, 40, 50, 75, 100 or 150 consecutive amino adds of one of the polypeptides of SEQ ID NOS: 209, 211, 213, 215, 217, 219, 221, 223, 225, 227, 229, 231, 233, 235, 237, 239, 241, 243. In another aspect, the invention provides the above nucleic acids for use in identifying everninomicin-type orthosomycin genes, everninomicin-type orthosomycin gene fragments, everninomicin-type orthosomycin gene clusters, and everninomicin-type orthosomycin producing organisms. The coding sequences of these nucleic acids may be identical to one of the coding sequences of one of the nucleic acids of SEQ ID NOS: 210, 212, 214, 216, 218, 220, 222, 224, 226, 228, 230, 232, 234, 236, 238, 240, 242, 244 or a fragment thereof or may be different coding sequences which encode one of the polypeptides of SEQ ID NOS: 209, 211, 213, 215, 217, 219, 221, 223, 225, 227, 229, 231, 233, 235, 237, 239, 241, 243 or fragments comprising at least 5, 10, 15, 20, 25, 30, 35, 40, 50, 75, 100 or 150 consecutive amino acids of one of the polypeptides of SEQ ID NOS: 209, 211, 213, 215, 217, 219, 221, 223, 225, 227, 229, 231, 233, 235, 237, 239, 241, 243 as a result of the redundancy or degeneracy of the genetic code.

[0016] The invention provides compositions for use in identifying avilamycin-type biosynthetic genes avilamycin type orthosomycin gene fragments, avilamycin-type orthosomycin gene clusters, and avilamycin-type orthosomycin producing organisms. In one aspect, the invention provides an isolated, purified, or enriched nucleic acid comprising one of the sequences of SEQ ID NOS: 246, 248, 250, 252, 254, 256 and the nucleic acid sequences corresponding to Genbank accession nos. AAG32068, AAK83183, AAG32069, AAK83172, AAK83171 and AAK83175; the sequences complementary thereto; or a fragment comprising at least 10, 15, 20, 25, 30, 35, 40, 50, 75, 100, 150, 200, 300, 400 or 500 consecutive bases of one of the sequences of SEQ ID NOS: 246, 248, 250, 252, 254, 256 and the nucleic acid sequences corresponding to Genbank accession nos. AAG32068, AAK83183, AAG32069, AAK83172, AAK83171 and AAK83175; or the sequences complementary thereto. In another aspect, the invention provides the above nucleic acids for use in identifying avilamycin-type orthosomycin genes and avilamycin-type orthosomycin producing organisms. The isolated, purified or enriched nucleic acids may comprise DNA, including cDNA, genomic DNA, and synthetic DNA. The DNA may be double stranded or single stranded, and if single stranded may be the coding or non-coding (anti-sense) strand Alternatively, the isolated, purified or enriched nucleic acids may comprise RNA.

[0017] The isolated, purified or enriched nucleic acids of one of SEQ ID NOS: 246, 248, 250, 252, 254, 256 may be used to prepare one of the polypeptides of SEQ ID NOS: 245, 247, 249, 251, 253 and 255 or fragments comprising at least 5, 10, 15, 20, 25, 30, 35, 40, 50, 75, 100 or 100 consecutive amino acids of one of the polypeptides of SEQ ID NO: 245, 247, 249, 251, 253.

[0018] Accordingly, the present invention also provides an isolated, purified or enriched nucleic acid which encodes one or the polypeptides of SEQ ID NOS: 245, 2 47, 249, 251, 253 or Genbank accession nos: AAG32068, AAK83183, AAG32069, AAK83172, AAK83171 and AAK83175 or fragments comprising at least 5, 10, 15, 20, 25, 30, 35, 40, 50, 75, 100 or 150 consecutive amino acids of one of the polypeptides of SEQ ID NOS: 245, 247, 249, 251, 253 or Genbank accession nos: AAG32068, AAK83183, AAG32069, AAK83172, AAK83171 and AAK83175. In another aspect, the invention provides the above nucleic acids for use in identifying avilamycin-type orthosomycin genes, avilamycin-type orthosomycin gene fragments, avilamycin-type orthosomycin gene clusters, and avilamycin-type orthosomycin producing organisms. The coding sequences of these nucleic acids may be identical to one of the coding sequences of one of the nucleic acids of SEQ ID NOS: 246, 248, 250, 252, 254, 256 or a fragment thereof or may be different coding sequences which encode one of the polypeptides of SEQ ID NOS; 246, 247, 249, 251, 253 or Genbank accession nos. AAG32068, AAK83183, AAG32069, AAK83172, AAK83171 and AAK83175, or fragments comprising at least 5, 10, 15, 20, 25, 30, 36, 40, 50, 75, 100 or 150 consecutive amino acids of one of the polypeptides of SEQ ID NOS: 245, 247, 249, 251, 253, or GenBank accession nos: AAG32068, AAK83183, AAG32069, AAK83172, AAK83171 and AAK83175 as a result of the redundancy or degeneracy of the genetic code.

[0019] The isolated, purified or enriched nucleic acid which encodes one of the polypeptides of SEQ ID NOS: 52, 54, 56, 58, 60, 62, 64, 66, 68, 70, 72, 74, 100, 102, 104, 106, 108, 110, 112, 114, 116, 124, 126, 128, 130, 132, 154, 156, 158, 160, 162, 164, 166, 168, 170, 172, 174, 176, 178, 180, 194, 196, 198, 200, 202, 204, 206, 208, 210, 212, 214, 216, 218, 220, 222, 224, 226, 228, 230, 232, 234, 236, 238, 240, 242, 244, 246, 248, 250, 252, 254, 256 may include, but is not limited to: (1) only the coding sequences of one of SEQ ID NOS: 52, 64, 56, 58, 60, 62, 64, 66, 68, 70, 72, 74, 100, 102, 104, 106, 108, 110, 112, 114, 118, 124, 126, 128, 130, 132, 154, 156, 158, 160, 162, 164, 166, 168, 170, 172, 174, 176, 178, 180, 194, 196, 198, 200, 202, 204, 206, 208, 210, 212, 214, 216, 218, 220, 222, 224, 226, 228, 230, 232, 234, 236, 238, 240, 242, 244, 246, 248, 250, 252, 254, 256; (2) the coding sequences of SEQ ID NOS: 52, 54, 56, 58, 60, 62, 64, 66, 68, 70, 72, 74, 100, 102, 104, 106, 108, 110, 112, 114, 116, 124, 126, 128, 130, 132, 154, 156, 158, 160, 162, 164, 166, 168, 170, 172, 174, 176, 178, 180, 194, 196, 198, 200, 202, 204, 206, 208, 210, 212, 214, 216, 218, 220, 222, 224, 226, 228, 230, 232, 234, 236, 238, 240, 242, 244, 246, 248; 250, 252, 254, 256 and additional coding sequences, such as leader sequences or proprotein; or (3) the coding sequences of SEQ ID NOS: and non-coding sequences, such as introns or non-coding sequences 5′ and/or 3′ of the coding sequence. Thus, as used herein, the term “polynucleotide encoding a polypeptide” encompasses a polynucleotide which includes only coding sequence for the polypeptide as well as a polynucleotide which includes additional coding and/or non-coding sequence.

[0020] The invention relates to polynucleotides which have polynucleotide changes that are “silent”, for example changes which do not alter the amino acid sequence encoded by the polynucleotides of SEQ ID NOS: 62, 64, 56, 58, 60, 62, 64, 66, 68, 70, 72, 74, 100, 102, 104, 106, 108, 110, 112, 114, 116, 124, 126, 128, 130, 132, 154, 156, 158, 160, 162, 164, 166, 168, 170, 172, 174, 116, 178, 180, 194, 196, 198, 200, 202, 204, 206, 208, 210,.212, 214, 216, 218, 220, 222, 224, 226, 228, 230, 232, 234, 236, 238, 240, 242, 244, 246, 248, 250, 252, 254, 256, for use in detecting orthosomycin biosynthetic genes and orthosomycin-producing organisms. The invention also relates to polynucleotides which have nucleotide changes which result in amino acid substitutions, additions, deletions, fusions and truncations of the polypeptides of SEQ ID NOS: 51, 63, 55, 57, 59, 61, 63, 65, 67, 69, 71, 73, 99, 101, 103, 106, 107, 109, 111, 113, 115, 123, 125, 127, 129, 131, 153, 155, 157, 159, 161, 163, 165, 167, 169, 171, 173, 175, 177, 179, 193, 145, 197, 199, 201, 203, 205, 207, 209, 211, 213, 215, 217, 219, 221, 223, 225, 227, 229, 231, 233, 235, 237, 239, 241, 243, 245, 247, 249, 251, 253, 255 for use in identifying orthosomycin biosynthetic genes and orthosomycin producing organisms.

[0021] In one aspect the compositions of the invention are used as probes to identify samples harbouring orthosomycin biosynthetic genes and orthosomycin biosynthetic loci. Samples may be in the form of environmental biomass, pure or mixed microbial culture, isolated genomic DNA from pure or mixed microbial culture, genomic DNA libraries from pure or mixed microbial culture. The compositions are used in polymerase chain reaction, and nucleic acid hybridization techniques well known to those skilled in the art.

[0022] In another embodiment, environmental samples that harbour microorganisms with the potential to produce orthosomycins are identified by PCR methods. Nucleic acids contained within the environmental sample are contacted with primers derived from the invention so as to amplify target orthosomycin biosynthetic gene sequences. Environmental samples deemed to be positive by PCR are then pursued to identify and isolate the orthosomycin gene cluster and the microorganism that contains the target gene sequences. The orthosomycin gene cluster may be identified by generating genomic DNA libraries (for example, cosmid, BAC, etc.) representative of genomic DNA from the population of various microorganisms contained within the environmental sample, locating genomic DNA clones that contain the target sequences and possibly overlapping clones (for example, by hybridization techniques or PCR), determining the sequence of the desired genomic DNA clones and deducing the ORFs of the orthosomycin biosynthetic locus. The microorganism that contains the orthosomycin biosynthetic locus may be identified and isolated, for example, by colony hybridization using nucleic acid probes derived from either the invention or the newly identified orthosomycin biosynthetic locus. The isolated orthosomycin biosynthetic locus may be introduced into an appropriate surrogate host to achieve heterologous production of the orthosomycin compound(s); alternatively, if the microorganism containing the orthosomycin biosynthetic locus is identified and isolated it may be subjected to fermentation to produce the orthosomycin compound(s).

[0023] In another embodiment of the invention, a microorganism that harbours an orthosomycin gene cluster is first identified and isolated as a pure culture, for example, by colony hybridization using nucleic acid probes derived from the invention. Beginning with a pure culture, a genomic DNA library (for example, cosmid, BAC, etc.) representative of genomic DNA from this single species is prepared, genomic DNA clones that contain the target sequences and possibly overlapping clones are located using probes derived from the invention (for example, by hybridization techniques or PCR), the sequence of the desired genomic DNA clones is determined and the ORFs of the orthosomycin biosynthetic locus are deduced. The microorganism containing the orthosomycin biosynthetic locus may be subjected to fermentation to produce the orthosomycin compound(s) or the orthosomycin biosynthetic locus may be introduced into an appropriate surrogate host to achieve heterologous production of the orthosomycin compound(s).

[0024] In another aspect of the invention, an orthosomycin gene cluster is identified in silico using one or more sequences selected from orthosomycin-specific nucleic acid code, everninomicin-specific nucleic acid code, avilamycin-specific nucleic acid code, orthosomycin-specific polypeptide code, everninomicin-specific polypeptide code and avilamycin-specific polypeptide code as taught by the invention. A query from a set of query sequences stored on computer readable medium is read and compared to a subject selected from the reference sequences of the invention. The level of similarity between said subject and query is determined and queries sequences representing orthosomycin genes are identified.

[0025] It is understood that the invention, having provided, compositions and methods to identify othosomycin biosynthetic gene cluster, everninomycin-type biosynthetic gene clusters and avilamycin-type biosynthetic gene clusters, further provides orthosomycins, everninomicin-type orthosomycins, and avilamycin-type orthsomycins produced by the biosynthetic gene dusters identified.

### BRIEF DESCRIPTION OF THE DRAWINGS

[0026] FIG. 1 is a block diagram of a computer system which implements and executes software tools for the purpose of comparing a query to a subject, wherein the subject is selected from the reference sequences of the invention

[0027] FIGS. 2A, 2B, 2C and 2D are flow diagrams of a sequence comparison software that can be employed for the purpose of comparing a query to a subject, wherein the subject is selected from the reference sequences of the invention, wherein

[0028] FIG. 2A is the query initialization subprocess of the sequence comparison software,

[0029] FIG. 2B is the subject datasource initilization subprocess of the sequence comparison software,

[0030] FIG. 2C illustrates the comparison subprocess and the analysis subprocess of the sequence comparison software,

[0031] FIG. 2D is the Display/Report subprocess of the sequence comparison software.

[0032] FIG. 3 is a flow diagram of the comparator algorithm (238) of FIG. 2C which is one embodiment of a comparator algorithm that can be used for pairwise determination of similarity between a query/subject pair.

[0033] FIG. 4 is a flow diagram of the analyzer algorithm (244) of FIG. 2C which is one embodiment of an analyzer algorithm that can be used to assign identity to a query sequence, based on similarity to a subject sequence, where the subject sequence is a reference sequence of the invention.

[0034] FIG. 5 is a schematic representation comparing the an avilamycin-type biosynthetic locus from Streptomyces mobaraensis (AVIA) to the avilamycin A biosynthetic locus from Streptomyces viridochromogenes Tu57 (AVIL), ORFs in the loci are identified by a four-letter protein family designation.

[0035] FIG. 6 illustrates a biosynthetic scheme wherein members of the proteins families commonly found in orthosomycin biosynthetic loci, namely KASA (EVEA ORF 17, SEQ ID NO: 84; EVER ORF 14, SEQ ID NO: 83; AVIA ORF 13, SEQ ID NO: 81; and AVIL ORF 15, Genbank accession no: AAK83178), PKSO (EVEA ORF 16, SEQ ID NO: 185; EVER ORF 32, SEQ ID NO: 183; AVIA ORF 14, SEQ ID NO: 181; and AVIL ORF 16, Genbank accession no: AAK83194), MTFA (EVEA ORF 44, SEQ ID NO: 97; EVER ORF 11, SEQ ID NO: 95; AVIA ORF 38, SEQ ID NO: 93), and HOMX (EVEA ORF 20, SEQ ID NO: 79; EVER ORF 20, SEQ ID NO: 77; AVIA ORF 36, SEQ ID NO: 75) provide for the formation of the dichloroisoeverninic moiety found in the ester linkage to the sugar residue B of orthosomycin oligosaccharides.

[0036] FIG. 7 illustrates two alternative biosynthetic routes wherein members of protein families diagnostic of orthosomycin biosynthetic loci, namely OXRW (AVIA ORFs 24 and 33 (SEQ ID NOS: 153 and 159); AVIL GenBank accession no. AAK83187; EVER ORFs 18 and 26 (SEQ ID NOs: 155 and 161); EVEA ORFs 11 and 30 (SEQ ID NO: 157 and 163)), and OXRV (AVIA ORF 19 (SEQ ID NO: 167), EVEA ORF 6 (SEQ ID NO: 173), AVIL GenBank accession no. AAK83181), EVER ORF 31 (SEQ ID NO: 169)) provide for the formation of the orthoester linkages joining residues C and D of orthosomycin oligosaccharides.

[0037] FIG. 8 illustrates a biosynthetic scheme wherein members of the proteins families diagnostic of everninomicin-type orthosomycin gene clusters and everninomicin-type orthosomycin producers, including DATC (EVER ORF 43 (SEQ ID NO: 209); EVEA ORF 37 (SEQ ID NO: 211)); MTFV (EVER ORF 44 (SEQ ID NO: 229), EVEA ORF 38 (SEQ ID NO: 231)); EPIM (EVER ORF 45 (SEQ ID NO: 217), EVEA ORF 39 (SEQ ID NO: 219)), DEPF (EVER ORF 46 (SEQ ID NO: 213), EVEA ORF 40 (SEQ ID NO: 215)), and OXBN (EVER ORF 42 (SEQ ID NO: 233), EVEA 36 (SEQ ID NO: 235)) provide for the formation of amino- and nitrosugar residues characterisitc of everninomicin-type orthosomycins.

[0038] FIG. 9 is a represents a picture of a 1% agarose gel stained with ethidium bromide generated in the PCR amplification experiments described in Example 8.

[0039] FIG. 10 is a schematic representation comparing the everninomicin biosynthetic locus from Micromonospora carbonacae var. aurantiaca (EVER) to the everninomicin biosynthetic locus from Micromonospora carbonacea var. africana (EVEA), ORFs in the loci are identified by a four-letter protein family designation.

### DETAILED DESCRIPTION OF THE INVENTION

[0040] The invention provides compositions and methods for identifying orthosomycin gene clusters and orthosomycin producing organisms. The invention also provides compositions and methods for distinguishing between everninomicin-type orthosomycin gene clusters and avilamycin-type orthosomycin gene cluster, and to distinguish between everninomicin-type orthosomycin producers and avilamycin-type orthosomycin producers. To provide the compositions and methods of the invention, the full-length biosynthetic locus for a member of each of the two classes of orthosomycin compounds was identified, sequenced and annotated. The biosynthetic locus for everninomicin in Micromonospora carbonacea var. aurantiaca (EVER) spans approximately 60 kb and contains 49 ORFs encoding proteins involved in the biosynthesis of everninomicin. The biosynthetic locus for an avilamycin-like compound from Streptomyces mobaraensis (AVIA) spans approximately 50 kb and contains 42 ORFs encoding proteins involved in the biosynthesis of an avilamycin-type compound.

[0041] Analysis of EVER and AVIA has revealed seventeen (17) protein families responsible for structural features common to all orthosomycin molecules and indicative of an orthosomycin biosynthetic locus. A member of each of these 17 protein families has been found in EVER, namely EVER ORFs 5, 8, 9, 12, 13, 15, 17 to 19, 24 to 26, 31, 33, 35 and 40 (SEQ ID NOS: 113, 65, 201, 71, 125, 101, 195, 155, 107, 53, 205, 161, 169, 177, 59 and 129 respectively), and also in AVIA, namely ORFs 1 to 3, 5, 9, 18, 19, 22 to 26, 31 to 34 and 37 (SEQ ID NOS: 123, 203, 127, 57, 199, 165, 167, 99, 105, 153, 111, 193, 51, 63, 159, 175 and 69 respectively). In EVER two of the protein families are fused together to form ORF 31 (SEQ ID NO: 169). A member of the 17 protein families has also been found in the biosynthetic locus for everninomicin from Micromonospora carbonacea var. africana and the biosynthetic locus for an avilamycin compound from Streptomyces viridochromogenes Tu57. Sequences from these 17 protein families form the basis for compositions and methods for identifying gene clusters involved in the biosynthesis of orthosomycins and for compositions and methods for identifying orthosomycin-producing organisms.

[0042] Analysis of EVER and AVIA has revealed nine (9) protein families that distinguish everninomicin-type orthosomycin biosynthetic loci from avilamycin-type orthosomicin biosynthetic loci. A member of each of these nine protein families has been found in EVER, namely EVER ORFs 3, 4, 21, 42, 43, 44, 45, 46 and 47 (SEQ ID NOS: 225, 237, 221, 233, 209, 229, 217, 213 and 241 respectively). A member of each of the 9 protein families has also been found in the biosynthetic locus for everninomicin from Micromonospora carbonacea var. africana. No members of these nine protein families were found in biosynthetic loci for avilamycin-type orthosomycins, including AVIA, the biosynthetic locus for an avilamycin compound from Streptomyces viridochromogenes Tu57. Sequences from these nine protein families form the basis for compositions and methods for identifying gene clusters involved in the biosynthesis of everninomicin-type orthosomycins and for compositions and methods for identifying everninomicin-type orthosomycin producing organisms.

[0043] Analysis of EVER and AVIA has revealed six (6) protein families that distinguish avilamycin-type orthosomycin biosynthetic loci from everninomicin-type orthosomycin biosynthetic loci. A member of each of these six protein families has been found in AVIA, namely AVIA ORFs 6, 7, 10, 21, 27 and 28 (SEQ ID NOS: 253, 251, 255, 247, 245 and 249). A member of the 6 protein families has also been found in the biosynthetic locus for an avilamycin compound from Streptomyces viridochromogenes Tu57. No member of these six protein families were found in biosynthetic loci for everninomicin-type orthorsomycins, including EVER and the biosynthetic locus for everninomicin from Micromonospora carbonacea var. africana. Sequences from these six protein families form the basis for compositions and methods for identifying gene clusters involved in the biosynthesis of avilamycin-type orthosomycins and for compositions and methods for identifying avilamycin-type orthosomycin producing organisms.

[0044] The compositions and methods of the invention can be used to detect the presence of virtually any organism that contains DNA for the production of orthosomycins (both everninomicin-type orthosomycins and avilamycin-type orthosomycins) regardless of the level at which genes for orthosomycin production are expressed by the organism or the amount of orthosomycin produced by the organism. Detection of nucleic acid sequences or amino acid sequences involved in the production of orthosomycins allows for the detection of new orthosomycin natural products, which natural products may not be produced by the organism under standard laboratory conditions or under the typical environmental conditions in which the organism is found in nature. Detection of the nucleic acid sequences or amino acid sequences involved in the production of orthosomycins allows for the detection of new orthosomycins which are produced at levels too low for detection by culture tests. Detection of nucleic acid sequences or amino acid sequences involved in the production of orthosomycins allows for the detection of new orthosomycin producers (both everninomicin-type orthosomycin producers and avilamycin-type orthosomycin producers) representing a source of new orthosomycin natural products.

[0045] Detection of the presence or absence of open reading frames necessary for orthosomycin production can be accomplished by hybridization probes or PCR primers based upon the compositions and teachings of the invention. Screening with a probe can be done either in silico or by traditional hybridization screening techniques.

[0046] Throughout the description and the figures, the biosynthetic locus for everninomicin from Micromonospora carbonacae var. aurantiaca NRRL 2997 is sometimes referred to as EVER, the biosynthetic locus for everninomicin from Micromonospora carbonacea var. africana (ATCC 39149, SCC 1413) is sometimes referred to as EVEA, the biosynthetic locus for an avilamycin-like compound from Streptomyces mobarensis is sometimes referred to as AVIA, and the biosynthetic locus for an avilamycin compound from Streptomyces viridochromogenes Tu57 is sometimes referred to as AVIL.

[0047] The ORFs in EVER, EVEA, AVIA and AVIL are assigned a putative function and grouped together in families based on homology to known proteins, or lack of homology to any known proteins. To correlate structure and function, the protein families are given a four-letter designation used throughout the description and figures as indicated on Table I.

Family descriptions

| Families | Proposed function |
|---|---|
| ABCD | ABC transporter; ATP-binding cassette transmembrane transporter; includes |
| | proteins with similarity to Mdr proteins of mammalian tumor cells that confer |
| | resistance structurally unrelated chemotherapeutic agents; resistance determinant |
| DATC | dehydratase/aminotransferase; SMAT family (secondary metabolism |
| | aminotransferase); transaminase |
| DEPA | dehydratase/epimerase; dTDP-glucose 4,6-dehydratases, catalyze the second step |
| | in 6-deoxyhexose biosynthesis; includes AveBII, StrE, OleE, DesIV, UrdH, SpcJ |
| DEPD | dehydratase/epimerase; may be specific for dGDP-mannose; similar to DEPE |
| DEPE | dehydratase/epimerase, NAD-dependent; includes enzymes that may be specific |
| | for dGDP-mannose; similar to DEPD |
| DEPF | dehydratase/epimerase; includes NDP-hexose 4-ketoreductase TyICIV, AveBIV, |
| | EryBIV, MegDV |
| DEPG | dehydratase/epimerase; includes the dTDP-ketodeoxyhexose reductases SnoG, |
| | LanZ3, DnmV, AknM |
| DEPH | dehydratase/epimerase/ketoreductase; similar to glucose 4-epimerases involved in |
| | primary metabolism |
| DEPI | dehydratase/epimerase, NAD-dependent; 4-ketoreductase; most similar to NDP- |
| | glucose 4-epimerases; includes Spcl |
| DEPJ | dehydratase/epimerase/ketoreductase; most similar to UDP-glucose-4-epimerases |
| DEPN | dehydratase/epimerase; similar to many plant putative dTDP-glucose-4,6- |
| | dehydratases |
| DHYA | dehydratase, deoxysugar; 2,3-dehydratases; 2 similar (repeated) substrate or |
| | cofactor binding motifs in this class; includes EryBVI, DnmT, LanS |
| EFFA | efflux; transmembrane transporter |
| ENGA | endoglucanase; hydrolysis of 1,4-beta-D-glucosidic linkage; likely resistance |
| | determinant; believed to be a secreted protein |
| EPIM | epimerase; NDP-hexose epimerase; TDP-4-ketohexose-3,5-epimerases, convert |
| | TDP-4-keto-6-deoxy-D-glucose to TDP-4-keto-6-deoxy-L-mannose (TDP-4-keto-L- |
| | rhamnose); includes EryBVII, DnmU, AknL, OleL, LanZ1 |
| GTFA | glycosyl transferase; includes EryBV, EryCIII, DesVII, TyIMII, Dau/DnrH, MtmGI-IV, |
| | LanGT1-4 |
| GTFE | glycosyltransferase; no homology to other GTFs |
| GTFG | glycosyltransferase; no homology to other GTFs |
| GTFH | glycosyltransferase; no homology to other GTFs |
| HOXG | oxidase domain homology |
| HOXM | hydroxylase/halogenase; strong similarity to non-heme |
| | halogenase/oxygenase/hydroxylases |
| HYDH | haloacid dehalogenase-like hydrolase; similarity to haloalkanoic acid |
| | dehydrogenases, convert 2-halo acids to 2-hydroxy acids plus halide |
| KASA | ketoacyl synthase; homology to 3-oxoacyl-[acyl-carrier-protein synthase III (KAS III, |
| | acetylCoA ACP transacylase), the principle enzyme responsible for the initiation of |
| | branched-chain fatty acid biosynthesis |
| KINB | kinase; similar to glucose kinase |
| MEMD | membrane protein; includes DrrB daunorubicin resistance transmembrane protein; |
| | resistance determinant |
| MEMK | membrane protein; Na/proton antiporter-like |
| MTBA | O-methyltransferase; includes TylF macrocin-O-methyltransferase, spinosyn SpnH |
| | rhamnose O-methyltransferase |
| MTFA | methyltransferase, SAM-dependent; includes O-methyltransferases, N,N- |
| | dimethyltransferases (e.g. spinosyn SpnS N-dimethyltransferase), C- |
| | methyltransferases |
| MTFD | methyltransferase |
| MTFE | methyltransferase |
| MTFF | methyltransferase domain homology |
| MTFG | methyltransferase domain homomogy |
| MTFH | methyltransferase; includes SnoY, OleY, TylE, SpnI rhamnose O-methyltransferase |
| MTFV | C-methyltransferase, SAM-dependent; includes tylCIII NDP-hexose 3-C- |
| | methyltransferase, NovU C-methyltransferase, EryBIII, DnrX |
| MTIA | resistance methyltransferase; similarity to SpoU family of 23S rRNA |
| | methyltransferases |
| MTLA | rRNA methyltransferase; includes avilamycin AviRa; resistance determinant |
| NUTA | nucleotidyltransferase; dNDP-glucose synthase; alpha-D-glucose-1-phosphate |
| | thymidylyltransferase; catalyze the first step in 6-deoxyhexose biosynthesis |
| OXBN | flavin-dependent oxidoreductase; shows strong homology to eukaryotic acyl CoA |
| | dehydrogenases; includes DnmZ |
| OXCO | oxidoreductase; blue copper oxidoreductase; similar to bilirubin oxidase and B. |
| | subtilis outer spore coat protein involved in brown pigmentation during |
| | sporogenesis; weak similarity to phenoxazinone synthase and yeast laccases |
| OXRA | oxidoreductase; NAD(H)-dependent dehydrogenases; includes OleW putative 3- |
| | ketoreductase, RdmF |
| OXRF | oxidoreductase; includes strT, eryBII, tylCII NDP-hexose 2,3-enoyl reductase |
| OXRT | oxidoreductase; dehydrogenase E1 component beta subunit; strongest homology |
| | to acetoin: DCPIP oxidoreductases from a variety of organisms |
| OXRU | oxidoreductase; dehydrogenase E1 component alpha subunit; strongest homology |
| | to thiamine pyrophosphate-dependent acetoin dehydrogenases from a variety of |
| | organisms |
| OXRV | oxidoreductase; dioxygenase; has domain homology to Pseudomonas putative |
| | alpha-ketoglutarate-dependent hypophosphite dioxygenase, a family of alpha- |
| | ketoglutarate-dependent dioxygenases that catalyze the oxidation of their |
| | respective substrates by using molecular oxygen as the immediate electron |
| | acceptor |
| OXRW | oxidoreductase; dioxygenase; includes SnoN, SnoK; note that |
| | OXRX = UNAJ + OXRW; show homology to Pseudomonas putative alpha- |
| | ketoglutarate-dependent hypophosphite dioxygenase, a family of alpha- |
| | ketoglutarate-dependent dioxygenases that catalyze the oxidation of their |
| | respective substrates by using molecular oxygen as the immediate electron |
| | acceptor; also includes proteins with homology to proline 4-hydroxylase, |
| | mammalian phytanoyl-CoA alpha hydroxylase |
| OXRX | oxidoreductase; dioxygenase; fusion of UNAJ and OXRW (OXRX = UNAJ + OXRW); |
| | the UNAJ portion may contain SAM-binding (methyltransferase) motifs; has domain |
| | homology to Pseudomonas putative alpha-ketoglutarate-dependent hypophosphite |
| | dioxygenase, a family of alpha-ketoglutarate-dependent dioxygenases that catalyze |
| | the oxidation of their respective substrates by using molecular oxygen as the |
| | immediate electron acceptor |
| PHOD | phosphatase; domain homology to phosphoglycolate phosphatase and other |
| | hydrolases |
| PKSO | iterative type I polyketide synthase; includes orsellinic acid synthase AviM |
| REBU | regulator, putative; small proteins that consist mostly of a HTH domain of the LuxR- |
| | type; strong homology to the C-terminal (LuxR-type) HTH domains of AbsA2-type |
| | response regulators |
| REBV | regulator, putative; small proteins that contain a C-terminal HTH domain having |
| | some homology to the C-terminal (LuxR-type) HTH domains of AbsA2-type |
| | response regulators |
| REGL | regulator, similar to Lacl family transcriptional regulators (generally repressors that |
| | lose high-affinity DNA binding in the presence of small molecule effectors) |
| UEVA | contains domain found in MoaA/NifB/PqqA molybdenum cofactor biosynthesis |
| | proteins, coenzyme PQQ synthesis protein and NirJ heme biosynthesis protein |
| UEVB | contains central double-stranded beta helix domain found in a variety of proteins |
| | and proposed to be involved in carbohydrate binding or protein-protein interactions, |
| | depending on the context in which it is found; this domain is found in e.g. mannose- |
| | 1-phosphate guanylyltransferases(GDP), dTDP-4-keto-6-deoxyglucose-3,5- |
| | epimerase (dTDP-L-rhamnose synthase), tetracenomycin TcmJ putative b-ring |
| | cyclase, elloramycin ElmJ, Pseudomonas WbjC putative nulcleotide-binding protein |
| | involved in O-antigen biosynthesis |
| UNAI | unknown; homolog of hypothetical S. coelicolor protein |
| UNAJ | unknown; contains domain found in many bacterial proteins, including hypothetical |
| | proteins and a variety of methyltransferases (a portion of this domain is also found |
| | in eukaryotic RNA helicases); also occurs as a domain fused to an everninomicin |
| | oxidoreductase (OXRX = UNAJ + OXRW) |
| UNBB | unknown |
| UNBR | unknown; N-terminal domain homology to some sugar |
| | dehydratase/epimerase/ketoreductases |
| UNKU | unknown |

[0048] “Isolated” means that the material is removed from its original environment, e.g. the natural environment if it is naturally occurring. For example, a naturally-occurring polynucleotide or polypeptide present in a living organism is not isolated, but the same polynucleotide or polypeptide, separated from some or all of the coexisting materials in the natural system, is isolated. Such polynucleotides could be part of a vector and/or such polynucleotides or polypeptides could be part of a composition, and still be isolated in that such vector or composition is not part of its natural environment.

[0049] The term “purified” does not require absolute purity; rather, it is intended as a relative definition. Individual nucleic acids obtained from a library have been conventionally purified to electrophoretic homogeneity. The sequences obtained from these clones could not be obtained directly from a large insert library, such as a cosmid library, or from total organism DNA. The purified nucleic acids of the present invention have been purified from the remainder of the genomic DNA in the organism by at least 10⁴ to 10⁶ fold. However, the term “purified” also includes nucleic acids which have been purified from the remainder of the genomic DNA or from other sequences in a library or other environment by at least one order of magnitude, preferably two or three orders of magnitude, and more preferably four or five orders of magnitude.

[0050] “Recombinant” means that the nucleic acid is adjacent to “backbone” nucleic acid to which it is not adjacent in its natural environment. “Enriched” nucleic acids represent 5% or more of the number of nucleic acid inserts in a population of nucleic acid backbone molecules. “Backbone” molecules include nucleic acids such as expression vectors, self-replicating nucleic acids, viruses, integrating nucleic acids, and other vectors or nucleic acids used to maintain or manipulate a nucleic acid of interest. Preferably, the enriched nucleic acids represent 15% or more, more preferably 50% or more, and most preferably 90% or more, of the number of nucleic acid inserts in the population of recombinant backbone molecules.

[0051] “Recombinant” polypeptides or proteins refers to polypeptides or proteins produced by recombinant DNA techniques, i.e. produced from cells transformed by an exogenous DNA construct encoding the desired polypeptide or protein. “Synthetic” polypeptides or proteins are those prepared by chemical synthesis.

[0052] The term “gene” means the segment of DNA involved in producing a polypeptide chain; it includes regions preceding and following the coding region (leader and trailer) as well as, where applicable, intervening regions (introns) between individual coding segments (exons).

[0053] A DNA “coding sequence” or “nucleotide sequence encoding” a particular polypeptide or protein, is a DNA sequence which is transcribed and translated into a polypeptide or protein when placed under the control of appropriate regulatory sequences

[0054] “Oligonucleotide” refers to a nucleic acid, generally of at least 10, preferably 15 and more preferably at least 20 nucleotides, preferably no more than 100 nucleotides, that are hybridizable to a genomic DNA molecule, a cDNA molecule, or an mRNA molecule encoding a gene, mRNA, cDNA or other nucleic acid of interest.

[0055] “Orthosomycin producer” or “orthosomycin-producing organism” refers to a microorganism which carries the genetic information necessary to produce an orthosomycin compound, whether or not the organism is known to produce an orthosomycin product. The terms apply equally to organisms in which the genetic information to produce an orthosomycin compound is found in the organism as it exists in its natural environment, and to organisms in which the genetic information is introduced by recombinant techniques. Orthosomycin producers include organisms of the family Micromonosporaceae, of which preferred genera include Micromonospora, Actinoplanes and Dactylosporangium; the family Streptomycetaceae, of which preferred genera include Streptomyces and Kitasatospora; and the family Pseudonocardiaceae, of which preferred genera are Amycolatopsis and Saccharopolyspora.

[0056] Deposits:

[0057] Three deposits of a E.coli DH10B strain each harboring a cosmid clone which together span the everninomicin biosynthetic locus from Micromonospora carbonacea aurantiaca were made on Jan. 24, 2001 with the International Depositary Authority of Canada (IDAC), 1015 Arlington Street, Winnipeg, Manitoba, Canada R3E 3R2. The deposits were assigned accession nos. IDAC 240101-1, IDAC 240101-2 and IDAC 240101-3. Two deposits of a E.coli DH1 OB strain each harboring a cosmid clone which together span the avilamycin-like biosynthetic locus from Streptomyces mobarensis were made on Feb. 27, 2001 with the International Depositary Authority of Canada (IDAC), 1015 Arlington Street, Winnipeg, Manitoba, Canada R3E 3R2. The deposits were assigned accession nos. IDAC 270201-1 and IDAC 270201-2. The E. coli strain deposits are referred to herein as “the deposited strains”.

[0058] The deposited strains together comprise the complete biosynthetic locus for everninomicin from Micromonospora carbonacae var. aurantiaca and the avilamycin-type compound from Streptomyces mobarensis. The sequence of the polynucleotides comprised in the deposited strains, as well as the amino acid sequence of any polypeptide encoded thereby are controlling in the event of any conflict with any description of sequences herein.

[0059] The deposits of the deposited strains have been made under the terms of the Budapest Treaty on the International Recognition of the Deposit of Micro-organisms for Purposes of Patent Procedure. The deposited strains will be irrevocably and without restriction or condition released to the public upon the issuance of a patent. The deposited strains are provided merely as convenience to those skilled in the art and are not an admission that a deposit is required for enablement, such as that required under 35 U.S.C. §112. A license may be required to make, use or sell the deposited strains, and compounds derived therefrom, and no such license is hereby granted.

[0060] Structural features common to all orthosomycins require one or more proteins selected from a group of 17 specific protein families, namely GTFE, GTFG, GTFH, HOXG, MTFD, MTFE, MTFF, MTLA, MTIA, OXRV, OXRW, OXRW, PHOD, UNAJ, UEVA, UEVB and UNKU. These 17 protein families include two OXRW families, although in EVER the second OXRW family is designated OXRX as it is a fusion of proteins from the UNAJ and OXRW families. A polypeptide representing a member of any one of these 17 protein families or a polynucleotide encoding a polypeptide representing a member of any one of these 17 protein families is considered diagnostic of an orthosomycin gene cluster and an orthosomycin-producing organism.

[0061] It is not expected that an orthosomycin biosynthetic locus will contain a member of each of the 17 protein families considered diagnostic of orthosomycin biosynthetic loci. For example, the UEVB and MTIA protein families are not found in the EVEA locus. Nonetheless, the UEVB and MTIA protein families are considered to be indicative of an orthosomycin locus as they are found in the AVIA, AVIL and EVER loci and no other homologues have been found to date. The presence of at least one, preferably 2, more preferably 4, still more preferably 6, still more preferably 8, still more preferably 10 or more of the seventeen protein families GTFE, GTFG, GTFH, HOXG, MTFD, MTFE, MTFF, MTLA, MTIA, OXRV, OXRW, OXRW, PHOD, UNAJ, UEVA, UEVB and UNKU indicates the presence of an orthosomycin biosynthetic locus and an orthosomycin producing organism.

[0062] Members of protein family GTFE include polypeptides selected from AVIA ORF 31 (SEQ ID NO: 51), AVIL GenBank accession no. AAK83192, EVER ORF 24 (SEQ ID NO: 53), EVEA ORF 33 (SEQ ID NO: 55) and polypeptides having at least 99%, at least 95%, at least 90%, at least 85%, at least 80% or at least 70% homology to a polypeptide having the sequence of SEQ ID NOS: 51, 53, 55 or AVIL GenBank accession no. AAK83192 as determined using the BLASTP algorithm with the default parameters.

[0063] Members of protein family GTFG include polypeptides selected from AVIA ORF 5 (SEQ ID NO: 57), AVIL GenBank accession no. AAK83170, EVER ORF 35 (SEQ ID NO: 59), EVEA ORF 27 (SEQ ID NO: 61) and polypeptides having at least 99%, at least 95%, at least 90%, at least 85%, at least 80% or at least 70% homology to a polypeptide having the sequence of SEQ ID NOS: 57, 59, 61 or AVIL GenBank accession no. AAK83170 as determined using the BLASTP algorithm with the default parameters.

[0064] Members of protein family GTFH include polypeptides selected from AVIA ORF 32 (SEQ ID NO: 63), AVIL GenBank accession no. AAK83193, EVER ORF 8 (SEQ ID NO: 65), EVEA ORF 31 (SEQ ID NO: 67), and polypeptides having at least 99%, at least 95%, at least 90%, at least 85%, at least 80% or at least 70% homology to a polypeptide having the sequence of SEQ ID NOS: 63, 65, 67 or AVIL GenBank accession no. AAK83193 as determined using the BLASTP algorithm with the default parameters.

[0065] Members of protein family HOXG include polypeptides selected from AVIA ORF 37 (SEQ ID NO: 69), EVER ORF 12 (SEQ ID NO: 71), EVEA ORF 43 (SEQ ID NO: 73), and polypeptides having at least 99%, at least 95%, at least 90%, at least 85%, at least 80% or at least 70% homology to a polypeptide having the sequence of SEQ ID NOS: 69, 71 or 73 as determined using the BLASTP algorithm with the default parameters.

[0066] Members of protein family MTFD include polypeptides selected from AVIA ORF 22 (SEQ ID NO: 99), AVIL GenBank accession no. AAK83184, EVER ORF 15 (SEQ ID NO: 101), EVEA ORF 8 (SEQ ID NO: 103), and polypeptides having at least 99%, at least 95%, at least 90%, at least 85%, at least 80% or at least 70% homology to a polypeptide having the sequence of SEQ ID NOS:99, 101, 103 or AVIL GenBank accession no. AAK83184 as determined using the BLASTP algorithm with the default parameters.

[0067] Members of protein family MTFE include polypeptides selected from AVIA ORF 23 (SEQ ID NO: 105), AVIL GenBank accession no. AAK83186, EVER ORF 19 (SEQ ID NO: 107), EVEA ORF 10 (SEQ ID NO: 109), and polypeptides having at least 99%, at least 95%, at least 90%, at least 85%, at least 80% or at least 70% homology to a polypeptide having the sequence of SEQ ID NOS: 105, 107, 109 or AVIL GenBank accession no. AAK83186 as determined using the BLASTP algorithm with the default parameters.

[0068] Members of protein family MTFF include polypeptides selected from AVIA ORF 25 (SEQ ID NO: 111), AVIL GenBank accession no. AAK83188, EVER ORF 5 (SEQ ID NO: 113), EVEA ORF 12 (SEQ ID NO: 115) and polypeptides having at least 99%, at least 95%, at least 90%, at least 85%, at least 80% or at least 70% homology to a polypeptide having the sequence of SEQ ID NOS: 111, 113, 115 or AVIL GenBank accession no. AAK83188 as determined using the BLASTP algorithm with the default parameters

[0069] Members of protein family MTLA include polypeptides selected from AVIA ORF 3 (SEQ ID NO: 127), AVIL GenBank accession no. AAG32067, EVER ORF 40 (SEQ ID NO: 129), EVEA ORF 45, SEQ ID NO: 131) and polypeptides having at least 99%, at least 95%, at least 90%, at least 85%, at least 80% or at least 70% homology to a polypeptide having the sequence of SEQ ID NOS: 127, 129, 131 or AVIL GenBank accession no. AAG32067 as determined using the BLASTP algorithm with the default parameters.

[0070] Members of protein family MTIA include polypeptides selected from AVIA ORF 1 (SEQ ID NO: 123), AVIL GenBank accession no. AAG32066, EVER ORF 13 (SEQ ID NO: 125) and polypeptides having at least 99%, at least 95%, at least 90%, at least 85%, at least 80% or at least 70% homology to a polypeptide having the sequence of SEQ ID NOS: 123, 125 or AVIL GenBank accession no. AAG32066 as determined using the BLASTP algorithm with the default parameters.

[0071] Members of protein family OXRV include polypeptides selected from AVIA ORF 24 (SEQ ID NO: 153), AVIL GenBank accession no. AAK83187, EVER ORF 18 (SEQ ID NO: 155), EVEA ORF 11 (SEQ ID NO: 157) and polypeptides having at least 99%, at least 95%, at least 90%, at least 85%, at least 80% or at least 70% homology to a polypeptide having the sequence of SEQ ID NOS: 153, 155, 157 or AVIL GenBank accession no. AAK83187 as determined using the BLASTP algorithm with the default parameters.

[0072] Members of protein family OXRW include polypeptides selected from AVIA ORF 33 (SEQ ID NO: 159), EVER ORF 26 (SEQ ID NO: 161), EVEA ORF 30 (SEQ ID NO: 163) and polypeptides having at least 99%, at least 95%, at least 90%, at least 85%, at least 80% or at least 70% homology to a polypeptide having the sequence of SEQ ID NOS: 159, 161 or 163 as determined using the BLASTP algorithm with the default parameters.

[0073] Members of protein family OXRW include polypeptides selected from AVIA ORF 19 (SEQ ID NO: 167), EVEA ORF 6 (SEQ ID NO: 173), AVIL GenBank accession no. AAK83181, EVER ORF 31 (SEQ ID NO: 169) and polypeptides having at least 99%, at least 95%, at least 90%, at least 85%, at least 80% or at least 70% homology to a polypeptide having the sequence of SEQ ID NOS: 167, 169, 173 or AVIL GenBank accession no. AAK83181 as determined using the BLASTP algorithm with the default parameters.

[0074] Members of protein family PHOD include polypeptides selected from AVIA ORF 34 (SEQ ID NO: 175), EVER ORF 33 (SEQ ID NO: 177), EVEA ORF 29 (SEQ ID NO: 179) and polypeptides having at least 99%, at least 95%, at least 90%, at least 85%, at least 80% or at least 70% homology to a polypeptide having the sequence of SEQ ID NOS: 175, 177 or 179 as determined using the BLASTP algorithm with the default parameters.

[0075] Members of protein family UNAJ include polypeptides selected from AVIA ORF 18 (SEQ ID NO: 165), EVEA ORF 5 (SEQ ID NO: 171), EVER ORF 31 (SEQ ID NO: 169) and polypeptides having at least 99%, at least 95%, at least 90%, at least 85%, at least 80% or at least 70% homology to a polypeptide having the sequence of SEQ ID NOS: 165, 169 or 171 as determined using the BLASTP algorithm with the default parameters.

[0076] Members of protein family UEVA include polypeptides selected from AVIA ORF 26 (SEQ ID NO: 193), AVIL GenBank accession no. AAK83189, EVER ORF 17 (SEQ ID NO: 195), EVEA ORF 14 (SEQ ID NO: 197) and polypeptides having at least 99%, at least 95%, at least 90%, at least 85%, at least 80% or at least 70% homology to a polypeptide having the sequence of SEQ ID NOS: 193, 195, 197 or AVIL GenBank accession no. AAK83189 as determined using the BLASTP algorithm with the default parameters.

[0077] Members of protein family UEVB include polypeptides selected from AVIA ORF 9 (SEQ ID NO: 199), AVIL GenBank accession no. AAK83174, EVER ORF 9 (SEQ ID NO: 201), and polypeptides having at least 99%, at least 95%, at least 90%, at least 85%, at least 80% or at least 70% homology to a polypeptide having the sequence of SEQ ID NOS: 199, 201 or AVIL GenBank accession no. AAK83174 as determined using the BLASTP algorithm with the default parameters.

[0078] Members of protein family UNKU include polypeptides selected from AVIA ORF 2 (SEQ ID NO: 203), EVER ORF 25 (SEQ ID NO: 205), EVEA ORF 32 (SEQ ID NO: 207) and polypeptides having at least 99%, at least 95%, at least 90%, at least 85%, at least 80% or at least 70% homology to a polypeptide having the sequence of SEQ ID NOS: 203, 205 or 207 as determined using the BLASTP algorithm with the default parameters.

[0079] Structural features that distinguish everninomicin-type orthosomycins from other orthosomycins require one or more proteins selected from a group of nine protein families, namely DATC, DEPF, EPIM, GTFA, MTFG, MTFV, OXBN, OXCO and UNBB. A polypeptide representing a member of any one of these nine protein families or a polynucleotide encoding a polypeptide representing a member of any one of these nine protein families is considered diagnostic of an everninomicin-type orthosomycin gene cluster and an everninomicin-type orthosomycin producing organism. In a preferred embodiment, a polypeptide representing a member of any one of these nine protein families, i.e. DATC, DEPF, EPIM, GTFA, MTFG, MTFV, OXBN, OXCO and UNBB, or a polynucleotide encoding a polypeptide representing a member of these nine protein families is detected together with one or more polypeptides representing a member of any one of the seventeen protein families diagnostic of an orthosomycin biosynthetic gene cluster, i.e. GTFE, GTFG, GTFH, HOXG, MTFD, MTFE, MTFF, MTLA, MTIA, OXRV, OXRW, OXRW, PHOD, UNAJ, UEVA, UEVB and UNKU or one or more polynucleotides encoding a polypeptide representing a member of these seventeen protein families.

[0080] It is not expected that an everninomicin-type orthosomycin biosynthetic locus will contain a member of each of the nine protein families considered diagnostic of everninomicin-type orthosomycin biosynthetic loci. Rather, the presence of at least one, preferably two, more preferably three, still more preferably four, and most preferably six or more of the nine protein families DATC, DEPF, EPIM, GTFA, MTFG, MTFV, OXBN, OXCO and UNBB indicates the presence of an everninomicin-type orthosomycin biosynthetic locus and an everninomicin-type orthosomycin producing organism. In a preferred embodiment, the presence of at least one, preferably two, more preferably three, still more preferably four, and most preferably six or more of the nine protein families DATC, DEPF, EPIM, GTFA, MTFG, MTFV, OXBN, OXCO and UNBB, detected together with the presence of at least one, preferably 2, more preferably 4, still more preferably 6, still more preferably 8 still more preferably 10 or more of the seventeen protein families diagnostic of an orthosomycin biosynthetic gene cluster, i.e. GTFE, GTFG, GTFH, HOXG, MTFD, MTFE, MTFF, MTLA, MTIA, OXRV, OXRW, OXRW, PHOD, UNAJ, UEVA, UEVB and UNKU indicates the presence of an everninomicin-type orthosomycin biosynthetic locus and an everninomicin-type orthosomycin producing organism.

[0081] Members of the protein family DATC include polypeptides selected from EVER ORF 43 (SEQ ID NO: 209), EVEA ORF 37 (SEQ ID NO: 211) and polypeptides having at least 99%, at least 95%, at least 90%, at least 85%, at least 80% or at least 70% homology to a polypeptide of EVER ORF 43 (SEQ ID NO: 209) or EVEA ORF 37 (SEQ ID NO: 211) as determined using the BLASTP algorithm with the default parameters.

[0082] Members of the protein family DEPF include polypeptides selected from EVER ORF 46 (SEQ ID NO: 213), EVEA ORF 40 (SEQ ID NO: 215) and polypeptides having at least 99%, at least 95%, at least 90%, at least 85%, at least 80% or at least 70% homology to a polypeptide of EVER ORF 46 (SEQ ID NO: 213) or EVEA ORF 40 (SEQ ID NO: 215) as determined using the BLASTP algorithm with the default parameters.

[0083] Members of the protein family EPIM include polypeptides selected from EVER ORF 45 (SEQ ID NO: 217), EVEA ORF 39 (SEQ ID NO: 219) and polypeptides having at least 99%, at least 95%, at least 90%, at least 85%, at least 80% or at least 70% homology to a polypeptide of EVER ORF 45 (SEQ ID NO: 217) or EVEA ORF 39 (SEQ ID NO: 219) as determined using the BLASTP algorithm with the default parameters.

[0084] Members of the protein family GTFA include polypeptides selected from EVER ORF 21 (SEQ ID NO: 221), EVEA ORF 35 (SEQ ID NO: 223) and polypeptides having at least 99%, at least 95%, at least 90%, at least 85%, at least 80% or at least 70% homology to a polypeptide of EVER ORF 21 (SEQ ID NO: 221) or EVEA ORF 35 (SEQ ID NO: 223) as determined using the BLASTP algorithm with the default parameters.

[0085] Members of protein family MTFG include polypeptides selected from EVER ORF 3 (SEQ ID NO: 225), EVEA ORF 18 (SEQ ID NO: 227), and polypeptides having at least 99%, at least 95%, at least 90%, at least 85%, at least 80% or at least 70% homology to a polypeptide of EVER ORF 3 (SEQ ID NO: 225) or EVEA ORF 18 (SEQ ID NO: 227) as determined using the BLASTP algorithm with the default parameters.

[0086] Members of protein family MTFV include polypeptides selected from EVER ORF 44 (SEQ ID NO: 229), EVEA ORF 38 (SEQ ID NO: 231) and polypeptides having at least 99%, at least 95%, at least 90%, at least 85%, at least 80% or at least 70% homology to a polypeptide of EVER ORF 44 (SEQ ID NO: 229) or EVEA ORF 38 (SEQ ID NO: 231) as determined using the BLASTP algorithm with the default parameters.

[0087] Members of protein family OXBN include polypeptides selected from EVER ORF 42 (SEQ ID NO: 233), EVEA 36 (SEQ ID NO: 235) and polypeptides having at least 99%, at least 95%, at least 90%, at least 85%, at least 80% or at least 70% homology to a polypeptide of EVER ORF 42 (SEQ ID NO: 233) or EVEA 36 (SEQ ID NO: 235) as determined using the BLASTP algorithm with the default parameters.

[0088] Members of protein family OXCO include polypeptides selected from EVER ORF 4 (SEQ ID NO: 237), EVEA ORF 19 (SEQ ID NO: 239) and polypeptides having at least 99%, at least 95%, at least 90%, at least 85%, at least 80% or at least 70% homology to a polypeptide of EVER ORF 4 (SEQ ID NO: 237) or EVEA ORF 19 (SEQ ID NO: 239) as determined using the BLASTP algorithm with the default parameters.

[0089] Members of protein family UNBB include polypeptides selected from EVER ORF 47 (SEQ ID NO: 241), EVEA ORF 41 (SEQ ID NO: 243) and polypeptides having at least 99%, at least 95%, at least 90%, at least 85%, at least 80% or at least 70% homology to a polypeptide of EVER ORF 47 (SEQ ID NO: 241) or EVEA ORF 41 (SEQ ID NO: 243) as determined using the BLASTP algorithm with the default parameters.

[0090] Structural features that distinguish avilamycin-type orthosomycins from other orthosomycins involve one or more proteins selected from a group of six protein families, namely ABCD, DEPN, MEMD, REBU, UNAI and UNBR. A polypeptide representing a member of any one of these six protein families or a polynucleotide encoding a polypeptide representing a member of any one or these six protein families is considered diagnostic of an avilamycin-type orthosomycin gene cluster and an avilamycin-type orthosomycin producing organism. In a preferred embodiment, a polypeptide representing a member of any one of these six protein families, i.e. ABCD, DEPN, MEMD, REBU, UNAI and UNBR or a polynucleotide encoding a polypeptide representing a member of these six protein families is detected together with one or more polypeptides representing a member of any one of the seventeen protein families diagnostic of an orthosomycin biosynthetic gene cluster, i.e. GTFE, GTFG, GTFH, HOXG, MTFD, MTFE, MTFF, MTLA, MTIA, OXRV, OXRW, OXRW, PHOD, UNAJ, UEVA, UEVB and UNKU or one or more polynucleotides encoding a polypeptide representing a member of these seventeen protein families.

[0091] It is not expected that an avilamycin-type orthosomycin biosynthetic locus will contain a member of each of the six protein families considered diagnostic of avilamycin-type orthosomycin biosynthetic loci. Rather, the presence of at least one, preferably two, more preferably three, still more preferably four, and most preferably five or six of the protein families ABCD, DEPN, MEMD, REBU, UNAI and UNBR indicates the presence of an avilamycin-type orthosomycin biosynthetic locus and an avilamycin-type orthosomycin producing organism. In a preferred embodiment, the presence of at least one, preferably two, more preferably three, still more preferably four, and most preferably five or six of the protein families ABCD, DEPN, MEMD, REBU, UNAI and UNBR, detected together with the presence of at least one, preferably 2, more preferably 4, still more preferably 6, still more preferably 8 still more preferably 10 or more of the seventeen protein families diagnostic of an orthosomycin biosynthetic gene cluster, i.e. GTFE, GTFG, GTFH, HOXG, MTFD, MTFE, MTFF, MTLA, MTIA, OXRV, OXRW, OXRW, PHOD, UNAJ, UEVA, UEVB and UNKU indicates the presence of an avilamycin-type orthosomycin biosynthetic locus and an avilamycin-type orthosomcyin producing organism.

[0092] Members of protein family ABCD include polypeptides selected from AVIA ORF 27 (SEQ ID NO: 245), AVIL GenBank accession no. AAG32068 and polypeptides having at least 99%, at least 95%, at least 90%, at least 85%, at least 80% or at least 70% homology to a polypeptide of AVIA ORF 27 (SEQ ID NO: 245) or AVIL GenBank accession no. AAG32068 as determined using the BLASTP algorithm with the default parameters.

[0093] Members of protein family DEPN include polypeptides selected from AVIA ORF 21 (SEQ ID NO: 247), AVIL GenBank accession no. AAK83183, and polypeptides having at least 99%, at least 95%, at least 90%, at least 85%, at least 80% or at least 70% homology to a polypeptide of AVIA ORF 21 (SEQ ID NO: 247) or AVIL GenBank accession no. AAK83183 as determined using the BLASTP algorithm with the default parameters.

[0094] Members of the protein family MEMD include polypeptides selected from AVIA ORF 28 (SEQ ID NO: 249), AVIL GenBank accession no. AAG32069, and polypeptides having at least 99%, at least 95%, at least 90%, at least 85%, at least 80% or at least 70% homology to a polypeptide of AVIA ORF 28 (SEQ ID NO: 249) or AVIL GenBank accession no. AAG32069 as determined using the BLASTP algorithm with the default parameters.

[0095] Members of the protein family REBU include polypeptides selected from AVIA ORF 7 (SEQ ID NO: 251), AVIL GenBank accession no. AAK83172, and polypeptides having at least 99%, at least 95%, at least 90%, at least 85%, at least * 80% or at least 70% homology to a polypeptide of AVIA ORF 7 (SEQ ID NO: 251) or AVIL GenBank accession no. AAK83172 as determined using the BLASTP algorithm with the default parameters.

[0096] Members of the protein family UNAI include polypeptides selected from AVIA ORF 6 (SEQ ID NO: 253), AVIL GenBank accession no. AAK83171 and polypeptides having at least 99%, at least 95%, at least 90%, at least 85%, at least 80% or at least 70% homology to a polypeptide of AVIA ORF 6 (SEQ ID NO: 253) or AVIL GenBank accession no. AAK83171 as determined using the BLASTP algorithm with the default parameters.

[0097] Members of the protein family UNBR include polypeptides selected from AVIA ORF 10 (SEQ ID NO: 255), AVIL GenBank accession no. AAK83175, and polypeptides having at least 99%, at least 95%, at least 90%, at least 85%, at least 80% or at least 70% homology to a polypeptide of AVIA ORF 10 (SEQ ID NO: 255) or AVIL GenBank accession no. AAK83175 as determined using the BLASTP algorithm with the default parameters.

[0098] Hybridization Probes and PCR Primers:

[0099] To identify an orthosomycin-producing organism or an orthosomycin biosynthetic locus, nucleic acids from cultivated microorganisms or from an environmental sample, e.g. soil, potentially harboring an organism having the genetic capacity to produce an orthosomycin compound may be contacted with a probe based on nucleotide sequences coding a member of the 17 protein families associated with biosynthesis of the structural features common to orthosomycins. Useful probes may be designed based on a nucleic acid or a combination of nucleic acids selected from the group consisting of (1) a nucleic acid sequence encoding a polypeptide of the GTFE family, for example a nucleic acid of SEQ ID NOS: 52, 54, 56, (the nucleic acid sequences coding for the GTFE protein in AVIA ORF 31, EVER ORF 24 and EVEA ORF 33 respectively) or the nucleic acid sequence coding for AVIL GenBank accession no. AAK83192; (2) a nucleic acid sequence encoding a polypeptide of the GTFG family, for example a nucleic acid of SEQ ID NOS: 58, 60, 62 (the nucleic acid sequences coding for the GTFG protein in AVIA ORF 5, EVER ORF 35 and EVEA ORF 27 respectively) or the nucleic acid sequence coding for AVIL GenBank accession no. AAK83170; (3) a nucleic acid sequence encoding a polypeptide of the GTFH family, for example a nucleic acid of SEQ ID NOS: 64, 66, 68 (the nucleic acid sequences coding for the GTFH protein in AVIA ORF 32, EVER ORF 8 and EVEA ORF 31 respectively) or the nucleic acid sequence coding for AVIL GenBank accession no. AAK83193; (4) a nucleic acid sequence encoding a polypeptide of the HOXG family, for example a nucleic acid of SEQ ID NOS: 70, 72, 74 (the nucleic acid sequences coding for the HOXG protein in AVIA ORF37, EVER ORF 12 and EVEA ORF 43 respectively); (5) a nucleic acid sequence encoding a polypeptide of the MTFD family, for example a nucleic acid of SEQ ID NOS: 100, 102, 104 (the nucleic acid sequences coding for the MTFD protein in AVIA ORF 22, EVER ORF 15 and EVEA ORF 8 respectively) or the nucleic acid sequence coding for AVIL GenBank accession no. AAK83184; (6) a nucleic acid sequence encoding a polypeptide of the MTFE family, for example a nucleic acid of SEQ ID NOS: 106, 108, 110 (the nucleic acid sequences coding for the MTFE protein in AVIA ORF 23, EVER ORF 19 and EVEA ORF 10 respectively) or the nucleic acid sequence coding for AVIL GenBank accession no. AAK83186; (7) a nucleic acid sequence encoding a polypeptide of the MTFF family, for example a nucleic acid of SEQ ID NOS: 112, 114, 116 (the nucleic acid sequences coding for the MTFF protein in AVIA ORF 25, EVER ORF 5 and EVEA ORF 12 respectively) or the nucleic acid sequence coding for AVIL GenBank accession no. AAK83188; (8) a nucleic acid sequence encoding a polypeptide of the MTLA family, for example a nucleic acid of SEQ ID NOS: 128, 130, 132 (the nucleic acid sequences coding for the MTLA protein in AVIA ORF 3, EVER ORF 40 and EVEA ORF 45 respectively) or the nucleic acid sequence coding for AVIL GenBank accession no. AAG32067; (9) a nucleic acid sequence encoding a polypeptide of the MTIA family, for example a nucleic acid of SEQ ID NOS: 124, 126 (the nucleic acid sequences coding for the MTIA protein in AVIA ORF 1 and EVER ORF 13 respectively) or the nucleic acid sequence coding for AVIL GenBank accession no. AAG32066; (10) a nucleic acid sequence encoding a polypeptide of the OXRV family, for example a nucleic acid of SEQ ID NOS: 154, 156, 158 (the nucleic acid sequences coding for the OXRV protein in AVIA ORF 24, EVER ORF 18 and EVEA ORF 11 respectively) or the nucleic acid sequence coding for AVIL GenBank accession no. AAK83187; (11) a nucleic acid sequence encoding a polypeptide of the OXRW family, for example a nucleic acid of SEQ ID NOS: 160, 162 and 164 (the nucleic acid sequences coding for the OXRW protein in AVIA ORF 33, EVER ORF 26 and EVEA ORF 30 respectively); (12) a nucleic acid sequence encoding a polypeptide of the OXRW/OXRX family, for example a nucleic acid of SEQ ID NOS: (the nucleic acid sequences coding for the second OXRW protein in AVIA ORF 19, SEQ ID NO: 167; EVEA ORF 6; SEQ ID NO: 173, respectively), SEQ ID NO: 170 (the nucleic acid coding the OXRX protein in EVER ORF 31, and the nucleic acid sequence coding for AVIL GenBank accession no. AAK83181; (13) a nucleic acid sequence encoding a polypeptide of the PHOD family, for example a nucleic acid of SEQ ID NOS: 176, 178 and 180 (the nucleic acid sequences coding for the PHOD protein in AVIA ORF 34, EVER ORF 33 and EVEA ORF 29 respectively); (14) a nucleic acid sequence encoding a polypeptide of the UNAJ/OXRX family, for example a nucleic acid of SEQ ID NOS: (the nucleic acid sequences coding for the UNAJ protein in AVIA ORF 18, SEQ ID NO: 165, and EVEA ORF 5, SEQ ID NO: 171, respectively), SEQ ID NO: 170 (the nucleic acid coding the OXRX protein in EVER ORF 31); (15) a nucleic acid sequence encoding a polypeptide of the UEVA family, for example a nucleic acid of SEQ ID NOS: 194, 196 and 198 (the nucleic acid sequences coding for the UEVA protein in AVIA ORF 26, EVER ORF 17 and EVEA ORF 14 respectively) or the nucleic acid sequence coding for AVIL GenBank accession no. AAK83189; (16) a nucleic acid sequence encoding a polypeptide of the UEVB family, for example a nucleic acid of SEQ ID NOS: 200 and 202 (the nucleic acid sequences coding for the UEVB protein in AVIA ORF 9, and EVER ORF 9 respectively) or the nucleic acid sequence coding for AVIL GenBank accession no. AAK83174; (17) a nucleic acid sequence encoding a polypeptide of the UNKU family, for example a nucleic acid of SEQ ID NOS: 204, 206, 208 (the nucleic acid sequences coding for the UNKU protein in AVIA ORF 2, EVER ORF 25 and EVEA ORF 32 respectively). Preferred probes are isolated, purified or enriched nucleic acids derived from SEQ ID NOS: 52, 54, 56, 58, 60, 62, 64, 66, 68, 70, 72, 74, 100, 102, 104, 106, 108, 110, 112, 114, 116, 124, 126, 128, 130, 132, 154, 156, 158, 160, 162, 164, 166, 168, 170, 172, 174, 176, 178, 180, 194, 196, 198, 200, 202, 204, 206, 208 and the sequences complementary thereto, or a fragment comprising at least 10, 15, 20, 25, 30, 40, 50, 75, 100, 150, 200, 300, 400 or 500 consecutive bases of one of the sequences of SEQ ID NO: 52, 54, 56, 58, 60, 62, 64, 66, 68, 70, 72, 74, 100, 102, 104, 106, 108, 110, 112, 114, 116, 124, 126, 128, 130, 132, 154, 156, 158, 160, 162, 164, 166, 168, 170, 172, 174, 176, 178, 180, 194, 196, 198, 200, 202, 204, 206, 208 or the sequences complementary thereto.

[0100] In such procedures, nucleic acids are obtained from cultivated microorganisms or from an environmental sample potentially harboring an organism having the genetic capacity to produce an orthosomycin compound. The nucleic acids are contacted with probes designed based on the teachings and compositions of the invention under conditions which permit the probe to specifically hybridize to any complementary sequences indicative of the presence of an orthosomycin-specific protein family. The presence of at least two, preferably five, more preferably 8, still more preferably 10 or more of the seventeen orthosomycin specific protein families indicates the presence of an orthosomycin biosynthetic locus or an orthosomycin producing organism.

[0101] Diagnostic nucleic acid sequences for identifying orthosomycin genes, biosynthetic loci, and microorganisms that harbor such genes or loci may be employed on complex mixtures of microorganisms such as those from environmental samples (e.g., soil). A mixture of microorganisms refers to a heterogeneous population of microorganisms consisting of more than one species or strain. In the absence of amplification outside of its natural habitat, such a mixture of microorganisms is said to be uncultured. A cultured mixture of microorganisms may be obtained by amplification or propagation outside of its natural habitat by in vitro culture using various growth media that provide essential nutrients. However, depending on the growth medium used, the amplification may preferentially result in amplification of a sub-population of the mixture and hence may not be always desirable. If desired, a pure culture representing a single species or strain may obtained from either a cultured or uncultured mixture of microorganisms by established microbiological techniques such as serial dilution followed by growth on solid media so as to isolate individual colony forming units.

[0102] Orthosomycin genes and/or orthosomycin biosynthetic loci may be identified from either a pure culture or cultured or uncultured mixtures of microorganisms employing the diagnostic nucleic acid sequences disclosed in this invention by experimental techniques such as PCR, hybridization, or shotgun sequencing followed by bioinformatic analysis of the sequence data. The identification of orthosomycin genes and/or an orthosomycin biosynthetic locus in a pure culture of a single organism directly distinguishes such an organism with the genetic potential to produce a natural compound or multiple natural compounds belonging to the orthosomycin class. The identification of orthosomycin genes and/or orthosomycin biosynthetic loci in a cultured or uncultured mixture of microorganisms requires further steps to identify and isolate the microorganism(s) that harbor(s) them so as to obtain pure cultures of such microorganisms. One general method that might be employed to identify microorganisms that harbour orthosomycin genes and/or orthosomycin biosynthetic loci from a cultured mixture of microorganisms is the colony lift technique (Ausubel et al., Current Protocols in Molecular Biology, John Wiley 503 Sons, Inc. 1997; and Sambrook et al., Molecular Cloning: A Laboratory Manual 2d Ed., Cold Spring Harbor Laboratory Press, 1989) in which the mixture is grown on an appropriate solid medium, the resulting colony forming units are replicated on a solid matrix such as a nylon membrane, the membrane is contacted with detectable diagnostic nucleic acid sequences, the positive colony forming units are identified, and the corresponding colony forming units on the original medium are identified, purified, and amplified.

[0103] The orthosomycin diagnostic nucleic acids may be used to survey a number of environmental samples for the presence of organisms that have the potential to produce orthosomycin compounds, i.e., those organisms that contain orthosomycin genes and/or orthosomycin biosynthetic loci. One protocol for use of a survey to identify a polypeptide from DNA isolated from uncultured mixtures of microorganisms is outlined in Seow et al. (1997) J. Bacteriol. Vol.179 pp. 7360-7368.

[0104] To identify an everninomicin-type orthosomycin producer or an everninomicin-type orthosomycin biosynthetic gene cluster, nucleic acids from an environmental sample, e.g. soil, potentially harboring an organism having the genetic capacity to produce an everninomicin-type orthosomycin compound may further contacted be with a probe constructed based on a nucleotide sequence corresponding to the protein families associated with the structural features unique to everninomicin-type orthosomycins. Useful probes may be designed based on a nucleic acid selected from the group consisting of (1) a nucleic acid sequence encoding a polypeptide of the DATC family, for example a nucleic acid of SEQ ID NOS: 210, 212 (the nucleic acid sequences coding for the DATC protein in EVER ORF 43 and EVEA ORF 37 respectively); (2) a nucleic acid sequence encoding a polypeptide of the DEPF family, for example a nucleic acid of SEQ ID NOS: 214, 216 (the nucleic acid sequences coding for the DEPF protein in EVER ORF 46 and EVEA ORF 40 respectively); (3) a nucleic acid sequence encoding a polypeptide of the EPIM family, for example a nucleic acid of SEQ ID NOS: 218 and 220 (the nucleic acid sequences coding for the EPIM protein in EVER ORF 45 and EVEA ORF 39 respectively); (4) a nucleic acid sequence encoding a polypeptide of the GTFA family, for example a nucleic acid of SEQ ID NOS: 222 and 224 (the nucleic acid sequences coding for the GTFA protein in EVER ORF 21 and EVEA ORF 35 respectively); (5) a nucleic acid sequence encoding a polypeptide of the MTFG family, for example a nucleic acid of SEQ ID NOS: 226, 228 (the nucleic acid sequences coding for the MTFG protein in EVER ORF 3 and EVEA ORF 18 respectively); (6) a nucleic acid sequence encoding a polypeptide of the MTFV family, for example a nucleic acid of SEQ ID NOS: 230, 232 (the nucleic acid sequences coding for the MTFV protein in EVER ORF 44 and EVEA ORF 38 respectively); (7) a nucleic acid sequence encoding a polypeptide of the OXBN family, for example a nucleic acid of SEQ ID NOS: 234 and 236 (the nucleic acid sequences coding for the OXBN protein in EVER ORF 42 and EVEA ORF 36 respectively); (8) a nucleic acid sequence encoding a polypeptide of the OXCO family, for example a nucleic acid of SEQ ID NOS: 238, 240 (the nucleic acid sequences coding for the OXCO protein in EVER ORF 4 and EVEA ORF 19 respectively); and (9) a nucleic acid sequence encoding a polypeptide of the UNBB family, for example a nucleic acid of SEQ ID NOS: 242, 244 (the nucleic acid sequences coding for the UNBB protein in EVER ORF 47 and EVEA ORF 41 respectively). Preferred probes are isolated, purified or enriched nucleic acid derived from SEQ ID NOS: 210, 212, 214, 216, 218, 220, 222, 224, 226, 228, 230, 232, 234, 236, 238, 240, 242, 244, and the sequences complementary thereto, or a fragment comprising at least 10, 15, 20, 25, 30, 40, 50, 75, 100, 150, 200, 300, 400 or 500 consecutive bases of one of the sequences of SEQ ID NOS: 210, 212, 214, 216, 218, 220, 222, 224, 226, 228, 230, 232, 234, 236, 238, 240, 242, 244 and the sequences complementary thereto.

[0105] In such procedures, nucleic acids are obtained from cultivated microorganisms or from an environmental sample potentially harboring an organism having the genetic capacity to produce an everninomicin-type orthosomycin compound. The environmental sample may be a mixture of microorganisms or a pure culture of a single microorganism. The nucleic acids are contacted with probes designed based on the teachings and compositions of the invention under conditions which permit the probe to specifically hybridize to any complementary sequences indicative of the presence of an everninomicin-type orthosomycin-specific protein family. The presence of at least one, preferably 2, more preferably 4, still more preferably 6 or more of the nine everninomicin-type orthosomycin specific protein families indicates the presence of an everninomicin-type orthosomycin biosynthetic locus and an everninomicin-type orthosomycin producing organism.

[0106] To identify an avilamycin-type orthosomycin producer or an avilamycin-type biosynthetic locus, nucleic acids from cultivated microorganisms or from an environmental sample, e.g. soil, potentially harboring an organism having the genetic capacity to produce an avilamycin-type orthosomycin compound is further contacted with a probe corresponding to a member of the six protein families associated with biosynthesis of the structural features common to avilamycin-type orthosomycins. Useful probes may be constructed from a nucleic acid selected from the group consisting of (1) a nucleic acid sequence encoding a polypeptide of the ABCD family, for example SEQ ID NO: 246 (AVIA ORF 27) or AVIL GenBank accession no. AAG32068; (2) a nucleic acid sequence encoding a polypeptide of the DEPN family, for example SEQ ID NO: 248 (AVIA ORF 21) or AVIL GenBank accession no. AAK83183; (3) a nucleic acid sequence encoding a polypeptide of the MEMD family, for example SEQ ID NO: 250 (AVIA ORF 28)-or AVIL GenBank accession no. AAG32069; (4) a nucleic acid sequence encoding a polypeptide of the REBU family, for example SEQ ID NO: 252 (AVIA ORF 7) or AVIL GenBank accession no. AAK83172; (5) a nucleic acid sequence encoding a polypeptide of the UNAI family, for example SEQ ID NO: 254 (AVIA ORF 6) or AVIL GenBank accession no. AAK83171; and (6) a nucleic acid sequence encoding a polypeptide of the UNBR family, for example SEQ ID NO: 256 (AVIA ORF 10) or AVIL GenBank accession no. AAK83175. Preferred probes are isolated, purified or enriched nucleic acid derived from SEQ ID NOS: 246, 248, 250, 252, 254, 256 and the nucleic acid sequences corresponding to Genbank accession nos. AAG32068, AAK83183, AAG32069, AAK83172, AAK83171 and AAK83175, the sequences complementary thereto, or a fragment comprising at least 10, 15, 20, 25, 30, 40, 50, 75, 100, 150, 200, 300, 400 or 500 consecutive bases of one of the sequences of SEQ ID NOS: 246, 248, 250, 252, 254, 256 and the sequences complementary thereto.

[0107] In such procedures, nucleic acids are obtained from cultivated microorganisms or from an environmental sample potentially harboring an organism having the genetic capacity to produce an avilamycin-type orthosomycin compound. The environmental sample may be a mixture of microorganisms or a pure culture of a single microorganism. The nucleic acids are contacted with probes designed based on the teachings and compositions of the invention under conditions which permit the probe to specifically hybridize to any complementary sequences indicative of the presence of an avilamycin-type orthosomycin-specific protein family. The presence of at least one, preferably 2, more preferably 3, still more preferably 4 or more of the six avilamycin-type orthosomycin specific protein families indicates the presence of an avilamycin-type orthosomycin biosynthetic locus and an avilamycin-type orthosomycin producing organism.

[0108] Where necessary, conditions which permit the probe to specifically hybridize to complementary sequences from an orthosomycin-producer may be determined by placing the probe in contact with complementary sequences obtained from an orthosomycin-producer as well as control sequences which are not from an orthosomycin-producer. In some analyses, the control sequences may be from organisms related to orthosomycin-producers. Alternatively, the control sequences are not related to orthosomycin-producers. Hybridization conditions, such as the salt concentration of the hybridization buffer, the formamide concentration of the hybridization buffer, or the hybridization temperature, may be varied to identify conditions which allow the probe to hybridize specifically to nucleic acids from orthosomycin-producers.

[0109] If the sample contains nucleic acids from orthosomycin-producers, specific hybridization of the probe to the nucleic acids from the orthosomycin-producer is then detected. Hybridization may be detected by labeling the probe with a detectable agent such as a radioactive isotope, a fluorescent dye or an enzyme capable of catalyzing the formation of a detectable product.

[0110] Many methods of using the labeled probes to detect the presence of nucleic acids from an orthosomycin-producer in a sample are familiar to those skilled in the art. These include Southern Blots, Northern Blots, colony hybridization procedures, and dot blots. Protocols for each of these procedures are provided in Ausubel et al., Current Protocols in Molecular Biology, John Wiley 503 Sons, Inc. 1997; and Sambrook et al., Molecular Cloning: A Laboratory Manual 2d Ed., Cold Spring Harbor Laboratory Press, 1989.

[0111] Alternatively, more than one probe designed based on the teachings and compositions of the invention may be used in an amplification reaction to determine whether the nucleic acid sample contains nucleic acids from an orthosomycin-producer. Preferably the probes comprise oligonucleotides. In one embodiment, the amplification reaction may comprise a Polymerase Chain Reaction (PCR) reaction. PCR protocols are described in Ausubel and Sambrook, supra. In such procedures, the nucleic acids in the sample are contacted with the probes, the amplification reaction is performed, and any amplification product is detected. The amplification product may be detected by performing gel electrophoresis on the reaction products and staining the gel with an interculator such as ethidium bromide. Alternatively, one or more of the probes may be labeled with a radioactive isotope and the presence of a radioactive isotope and the presence of a radioactive amplification product may be detected by autoradiography after gel electrophoresis.

[0112] The isolated, purified or enriched nucleic acids of SEQ ID NOS: 52, 54, 56, 58, 60, 62, 64, 66, 68, 70, 72, 74, 100, 102, 104, 106, 108, 110, 112, 114, 116, 124, 126, 128, 130, 132, 154, 156, 158, 160, 162, 164, 166, 168, 170, 172, 174, 176, 178, 180, 194, 196, 198, 200, 202, 204, 206, 208, 210, 212, 214, 216, 218, 220, 222, 224, 226, 228, 230, 232, 234, 236, 238, 240, 242, 244, 246, 248, 250, 252, 254, 256, the sequences complementary thereto, or a fragment comprising at least 10, 15, 20, 25, 30, 35, 40, 50, 75, 100, 150, 200, 300, 400 or 500 consecutive bases of one of the sequence of SEQ ID NOS: 52, 54, 56, 58, 60, 62, 64, 66, 68, 70, 72, 74, 100, 102, 104, 106, 108, 110, 112, 114, 116, 124, 126, 128, 130, 132, 154, 156, 158, 160, 162, 164, 166, 168, 170, 172, 174, 176, 178, 180, 194, 196, 198, 200, 202, 204, 206, 208, 210, 212, 214, 216, 218, 220, 222, 224, 226, 228, 230, 232, 234, 236, 238, 240, 242, 244, 246, 248, 250, 252, 254, 256, or the sequences complementary thereto may be used as probes to identify and isolate DNAs encoding the polypeptides of SEQ ID NOS: 51, 53, 55, 57, 59, 61, 63, 65, 67, 69, 71, 73, 99, 101, 103, 105, 107, 109, 111, 113, 115, 123, 125, 127, 129, 131, 153, 155, 157, 159, 161, 163, 165, 167, 169, 171, 173, 175, 177, 179, 193, 195, 197, 199, 201, 203, 205, 207, 209, 211, 213, 215, 217, 219, 221, 223, 225, 227, 229, 231, 233, 235, 237, 239, 241, 243, 245, 247, 249, 251, 253, 255 respectively. In such procedures, a genomic DNA library is constructed from a sample containing an orthosomycin producer. The genomic DNA library is then contacted with a probe comprising a coding sequence or a fragment of the coding sequence, encoding one of the polypeptides of SEQ ID NOS: 51, 53, 55, 57, 59, 61, 63, 65, 67, 69, 71, 73, 99, 101, 103, 105, 107, 109, 111, 113, 115, 123, 125, 127, 129, 131, 153, 155, 157, 159, 161, 163, 165, 167, 169, 171, 173, 175, 177, 179, 193, 195, 197, 199, 201, 203, 205, 207, 209, 211, 213, 215, 217, 219, 221, 223, 225, 227, 229, 231, 233, 235, 237, 239, 241, 243, 245, 247, 249, 251, 253, 255, or a fragment thereof under conditions which permit the probe to specifically hybridize to sequences complementary thereto. In a preferred embodiment, the probe is an oligonucleotide of about 10 to about 30 nucleotides in length designed based on a nucleic acid of SEQ ID NOS: 52, 54, 56, 58, 60, 62, 64, 66, 68, 70, 72, 74, 100, 102, 104, 106, 108, 110, 112, 114, 116, 124, 126, 128, 130, 132, 154, 156, 158, 160, 162, 164, 166, 168, 170, 172, 174, 176, 178, 180, 194, 196, 198, 200, 202, 204, 206, 208, 210, 212, 214, 216, 218, 220, 222, 224, 226, 228, 230, 232, 234, 236, 238, 240, 242, 244, 246, 248, 250, 252, 254, 256,. Genomic DNA clones which hybridize to the probe are then detected and isolated. Procedures for preparing and identifying DNA clones of interest are disclosed in Ausubel et al., Current Protocols in Molecular Biology, John Wiley 503 Sons, Inc. 1997; and Sambrook et al., Molecular Cloning: A Laboratory Manual 2d Ed., Cold Spring Harbor Laboratory Press, 1989.

[0113] The isolated, purified or enriched nucleic acids of SEQ ID NOS: 52, 54, 56, 58, 60, 62, 64, 66, 68, 70, 72, 74, 100, 102, 104, 106, 108, 110, 112, 114, 116, 124, 126, 128, 130, 132, 154, 156, 158, 160, 162, 164, 166, 168, 170, 172, 174, 176, 178, 180, 194, 196, 198, 200, 202, 204, 206, 208, 210, 212, 214, 216, 218, 220, 222, 224, 226, 228, 230, 232, 234, 236, 238, 240, 242, 244, 246, 248, 250, 252, 254, 256, the sequences complementary thereto, or a fragment comprising at least 10, 15, 20, 25, 30, 35, 40, 50, 75, 100, 150, 200, 300, 400 or 500 consecutive bases of one of the sequences of SEQ ID NOS: 52, 54, 56, 58, 60, 62, 64, 66, 68, 70, 72, 74, 100, 102, 104, 106, 108, 110, 112, 114, 116, 124, 126, 128, 130, 132, 154, 156, 158, 160, 162, 164, 166, 168, 170, 172, 174, 176, 178, 180, 194, 196, 198, 200, 202, 204, 206, 208, 210, 212, 214, 216, 218, 220, 222, 224, 226, 228, 230, 232, 234, 236, 238, 240, 242, 244, 246, 248, 250, 252, 254, 256, or the sequences complementary thereto may be used as probes to identify and isolate related nucleic acids. In some embodiments, the related nucleic acids may be genomic DNAs (or cDNAs) from potential orthosomycin producers. In such procedures, a nucleic acid sample containing nucleic acids from a potential orthosomycin-producer is contacted with the probe under conditions which permit the probe to specifically hybridize to related sequences. The nucleic acid sample may be a genomic DNA (or cDNA) library from the potential orthosomycin-producer. Hybridization of the probe to nucleic acids is then detected using any of the methods described above.

[0114] Hybridization may be carried out under conditions of low stringency, moderate stringency or high stringency. As an example of nucleic acid hybridization, a polymer membrane containing immobilized denatured nucleic acids is first prehybridized for 30 minutes at 45° C. in a solution consisting of 0.9 M NaCl, 50 mM NaH₂PO₄, pH 7.0, 5.0 mM Na₂EDTA, 0.5% SDS, 10× Denhardt's, and 0.5 mg/ml polyriboadenylic acid. Approximately 2×10⁷ cpm (specific activity 4-9×10⁸ cpm/ug) of ³²P end-labeled oligonucleotide probe are then added to the solution. After 12-16 hours of incubation, the membrane is washed for 30 minutes at room temperature in 1× SET (150 mM NaCl, 20 mM Tris hydrochloride, pH 7.8, 1 mM Na₂EDTA) containing 0.5% SDS, followed by a 30 minute wash in fresh 1× SET at Tm-10 C for the oligonucleotide probe where Tm is the melting temperature. The membrane is then exposed to auto-radiographic film for detection of hybridization signals.

[0115] By varying the stringency of the hybridization conditions used to identify nucleic acids, such as genomic DNAs or cDNAs, which hybridize to the detectable probe, nucleic acids having different levels of homology to the probe can be identified and isolated. Stringency may be varied by conducting the hybridization at varying temperatures below the melting temperatures of the probes. The melting temperature of the probe may be calculated using the following formulas:

[0116] For oligonucleotide probes between 14 and 70 nucleotides in length the melting temperature (Tm) in degrees Celcius may be calculated using the formula: Tm=81.5+16.6(log [Na+])+0.41 (fraction G+C)−(600/N) where N is the length of the oligonucleotide.

[0117] If the hybridization is carried out in a solution containing formamide, the melting temperature may be calculated using the equation Tm=81.5+16.6(log [Na +])+0.41 (fraction G+C)−(0.63% formamide)−(600/N) where N is the length of the probe.

[0118] Prehybridization may be carried out in 6× SSC, 5× Denhardt's reagent, 0.5% SDS, 0.1 mg/ml denatured fragmented salmon sperm DNA or 6× SSC, 5× Denhardt's reagent, 0.5% SDS, 0.1 mg/ml denatured fragmented salmon sperm DNA, 50% formamide. The composition of the SSC and Denhardt's solutions are listed in Sambrook et al., supra.

[0119] Hybridization is conducted by adding the detectable probe to the hybridization solutions listed above. Where the probe comprises double stranded DNA, it is denatured by incubating at elevated temperatures and quickly cooling before addition to the hybridization solution. It may also be desirable to similarly denature single stranded probes to eliminate or diminish formation of secondary structures or oligomerization. The filter is contacted with the hybridization solution for a sufficient period of time to allow the probe to hybridize to cDNAs or genomic DNAs containing sequences complementary thereto or homologous thereto. For probes over 200 nucleotides in length, the hybridization may be carried out at 15-25° C. below the Tm. For shorter probes, such as oligonucleotide probes, the hybridization may be conducted at 5-10° C. below the Tm. Preferably, the hybridization is conducted in 6× SSC, for shorter probes. Preferably, the hybridization is conducted in 50% formamide containing solutions, for longer probes.

[0120] All the foregoing hybridizations would be considered to be examples of hybridization performed under conditions of high stringency.

[0121] Following hybridization, the filter is washed for at least 15 minutes in 2× SSC, 0.1% SDS at room temperature or higher, depending on the desired stringency. The filter is then washed with 0.1× SSC, 0.5% SDS at room temperature (again) for 30 minutes to 1 hour.

[0122] Nucleic acids which have hybridized to the probe are identified by autoradiography or other conventional techniques.

[0123] The above procedure may be modified to identify nucleic acids having decreasing levels of homology to the probe sequence. For example, to obtain nucleic acids of decreasing homology to the detectable probe, less stringent conditions may be used. For example, the hybridization temperature may be decreased in increments of 5° C. from 68° C. to 42° C. in a hybridization buffer having a Na+ concentration of approximately 1 M. Following hybridization, the filter may be washed with 2× SSC, 0.5% SDS at the temperature of hybridization. These conditions are considered to be “moderate stringency” conditions above 50° C. and “low stringency” conditions below 50° C. A specific example of “moderate stringency” hybridization conditions is when the above hybridization is conducted at 55° C. A specific example of “low stringency” hybridization conditions is when the above hybridization is conducted at 45° C.

[0124] Alternatively, the hybridization may be carried out in buffers, such as 6× SSC, containing formamide at a temperature of 42° C. In this case, the concentration of formamide in the hybridization buffer may be reduced in 5% increments from 50% to 0% to identify clones having decreasing levels of homology to the probe. Following hybridization, the filter may be washed with 6× SSC, 0.5% SDS at 50° C. These conditions are considered to be “moderate stringency” conditions above 25% formamide and “low stringency” conditions below 25% formamide. A specific example of “moderate stringency” hybridization conditions is when the above hybridization is conducted at 30% formamide. A specific example of “low stringency” hybridization conditions is when the above hybridization is conducted at 10% formamide.

[0125] Nucleic acids which have hybridized to the probe are identified by autoradiography or other conventional techniques.

[0126] For example, the preceding methods may be used to isolate nucleic acids having a sequence with at least 97%, at least 95%, at least 90%, at least 85%, at least 80%, or at least 70% homology to a nucleic acid sequence selected from the group consisting of the sequences of SEQ ID NOS: 52, 54, 56, 58, 60, 62, 64, 66, 68, 70, 72, 74, 100, 102, 104, 106, 108, 110, 112, 114, 116, 124, 126, 128, 130, 132, 154, 156, 158, 160, 162, 164, 166, 168, 170, 172, 174, 176, 178, 180, 194, 196, 198, 200, 202, 204, 206, 208, 210, 212, 214, 216, 218, 220, 222, 224, 226, 228, 230, 232, 234, 236, 238, 240, 242, 244, 246, 248, 250, 252, 254, 256, fragments comprising at least 10, 15, 20, 25, 30, 35, 40, 50, 75, 100, 150, 200, 300, 400, or 500 consecutive bases thereof, and the sequences complementary thereto. Homology may be measured using BLASTN version 2.0 with the default parameters. For example, the homologous polynucleotides may have a coding sequence which is a naturally occurring allelic variant of one of the coding sequences described herein. Such allelic variant may have a substitution, deletion or addition of one or more nucleotides when compared to the nucleic acids of SEQ ID NOS: 52, 54, 56, 58, 60, 62, 64, 66, 68, 70, 72, 74, 100, 102, 104, 106, 108, 110, 112, 114, 116, 124, 126, 128, 130, 132, 154, 156, 158, 160, 162, 164, 166, 168, 170, 172, 174, 176, 178, 180, 194, 196, 198, 200, 202, 204, 206, 208, 210, 212, 214, 216, 218, 220, 222, 224, 226, 228, 230, 232, 234, 236, 238, 240, 242, 244, 246, 248, 250, 252, 254, 256, or the sequences complementary thereto.

[0127] Additionally, the above procedures may be used to isolate nucleic acids which encode polypeptides having at least 99%, 95%, at least 90%, at least 85%, at least 80%, or at least 70% homology to a polypeptide having the sequence of one of SEQ ID NOS: 51, 53, 55, 57, 59, 61, 63, 65, 67, 69, 71, 73, 99, 101, 103, 105, 107, 109, 111, 113, 115, 123, 125, 127, 129, 131, 153, 155, 157, 159, 161, 163, 165, 167, 169, 171, 173, 175, 177, 179, 193, 195, 197, 199, 201, 203, 205, 207, 209, 211, 213, 215, 217, 219, 221, 223, 225, 227, 229, 231, 233, 235, 237, 239, 241, 243, 245, 247, 249, 251, 253, 255, or fragments comprising at least 5, 10, 15, 20, 25, 30, 35, 40, 50, 75, 100, or 150 consecutive amino acids thereof as determined using the BLASTP version 2.2.2 algorithm with default parameters.

[0128] Bioinformatics:

[0129] As used herein, the term “orthosomycin-specific nucleic acid codes” encompass the nucleotide sequences of SEQ ID NOS: 52, 54, 56, 58, 60, 62, 64, 66, 68, 70, 72, 74, 100, 102, 104, 106, 108, 110, 112, 114, 116, 124, 126, 128, 130, 132, 154, 156, 158, 160, 162, 164, 166, 168, 170, 172, 174, 176, 178, 180, 194, 196, 198, 200, 202, 204, 206, 208, fragments of SEQ ID NOS: 52, 54, 56, 58, 60, 62, 64, 66, 68, 70, 72, 74, 100, 102, 104, 106, 108, 110, 112, 114, 116, 124, 126, 128, 130, 132, 154, 156, 158, 160, 162, 164, 166, 168, 170, 172, 174, 176, 178, 180, 194, 196, 198, 200, 202, 204, 206, 208, nucleotide sequences homologous to SEQ ID NOS: 52, 54, 56, 58, 60, 62, 64, 66, 68, 70, 72, 74, 100, 102, 104, 106, 108, 110, 112, 114, 116, 124, 126, 128, 130, 132, 154, 156, 158, 160, 162, 164, 166, 168, 170, 172, 174, 176, 178, 180, 194, 196, 198, 200, 202, 204, 206, 208, or homologous to fragments of SEQ ID NOS: 52, 54, 56, 58, 60, 62, 64, 66, 68, 70, 72, 74, 100, 102, 104, 106, 108, 110, 112, 114, 116, 124, 126, 128, 130, 132, 154, 156, 158, 160, 162, 164, 166, 168, 170, 172, 174, 176, 178, 180, 194, 196, 198, 200, 202, 204, 206, 208, and sequences complementary to all of the preceding sequences. The fragments include portions of SEQ ID NOS: 52, 54, 56, 58, 60, 62, 64, 66, 68, 70, 72, 74, 100, 102, 104, 106, 108, 110, 112, 114, 116, 124, 126, 128, 130, 132, 154, 156, 158, 160, 162, 164, 166, 168, 170, 172, 174, 176, 178, 180, 194, 196, 198, 200, 202, 204, 206, 208 comprising at least 10, 15, 20, 25, 30, 35, 40, 50, 75, 100, 150, 200, 300, 400 or 500 consecutive nucleotides of SEQ ID NOS: 52, 54, 56, 58, 60, 62, 64, 66, 68, 70, 72, 74, 100, 102, 104, 106, 108, 110, 112, 114, 116, 124, 126, 128, 130, 132, 154, 156, 158, 160, 162, 164, 166, 168, 170, 172, 174, 176, 178, 180, 194, 196, 198, 200, 202, 204, 206, 208. Preferably, the fragments are novel fragments. Homologous sequences and fragments of SEQ ID NOS: 52, 54, 56, 58, 60, 62, 64, 66, 68, 70, 72, 74, 100, 102, 104, 106, 108, 110, 112, 114, 116, 124, 126, 128, 130, 132, 154, 156, 158, 160, 162, 164, 166, 168, 170, 172, 174, 176, 178, 180, 194, 196, 198, 200, 202, 204, 206, 208 refer to a sequence having at least 99%, 98%, 97%, 96%, 95%, 90%, 80%, 75% or 70% homology to these sequences. Homology may be determined using any of the computer programs and parameters described herein, including BLASTN and TBLASTX with the default parameters. Homologous sequences also include RNA sequences in which uridines replace the thymines in the nucleic acid codes of SEQ ID NOS: 52, 54, 56, 58, 60, 62, 64, 66, 68, 70, 72, 74, 100, 102, 104, 106, 108, 110, 112, 114, 116, 124, 126, 128, 130, 132, 154, 156, 158, 160, 162, 164, 166, 168, 170, 172, 174, 176, 178, 180, 194, 196, 198, 200, 202, 204, 206, 208. The homologous sequences may be obtained using any of the procedures described herein or may result from the correction of a sequencing error. It will be appreciated that the nucleic acid codes of SEQ ID NOS: 52, 54, 56, 58, 60, 62, 64, 66, 68, 70, 72, 74, 100, 102, 104, 106, 108, 110, 112, 114, 116, 124, 126, 128, 130, 132, 154, 156, 158, 160, 162, 164, 166, 168, 170, 172, 174, 176, 178, 180, 194, 196, 198, 200, 202, 204, 206, 208 can be represented in the traditional single character format in which G, A, T and C denote the guanine, adenine, thymine and cytosine bases of the deoxyribonucleic acid (DNA) sequence respectively, or in which G, A, U and C denote the guanine adenine, uracil and cytosine bases of the ribonucleic acid (RNA) sequence (see the inside back cover of Stryer, Biochemistry, 3^{rd} edition, W. H. Freeman & Co., New York) or in any other format which records the identity of the nucleotides in a sequence.

[0130] The term “everninomicin-specific nucleic acid codes” encompass the nucleotide sequences of SEQ ID NOS: 210, 212, 214, 216, 218, 220, 222, 224, 226, 228, 230, 232, 234, 236, 238, 240, 242, 244, fragments of SEQ ID NOS: 210, 212, 214, 216, 218, 220, 222, 224, 226, 228, 230, 232, 234, 236, 238, 240, 242, 244, nucleotide sequences homologous to SEQ ID NOS: 210, 212, 214, 216, 218, 220, 222, 224, 226, 228, 230, 232, 234, 236, 238, 240, 242, 244, or homologous to fragments of SEQ ID NOS: 210, 212, 214, 216, 218, 220, 222, 224, 226, 228, 230, 232, 234, 236, 238, 240, 242, 244, and sequences complementary to all of the preceding sequences. The fragments include portions of SEQ ID NOS: 210, 212, 214, 216, 218, 220, 222, 224, 226, 228, 230, 232, 234, 236, 238, 240, 242, 244 comprising at least 10, 15, 20, 25, 30, 35, 40, 50, 75, 100, 150, 200, 300, 400 or 500 consecutive nucleotides of SEQ ID NOS: 210, 212, 214, 216, 218, 220, 222, 224, 226, 228, 230, 232, 234, 236, 238, 240, 242, 244. Preferably, the fragments are novel fragments. Homologous sequences and fragments of SEQ ID NOS: 210, 212, 214, 216, 218, 220, 222, 224, 226, 228, 230, 232, 234, 236, 238, 240, 242, 244, refer to a sequence having at least 99%, 98%, 97%, 96%, 95%, 90%, 80%, 75% or 70% homology to these sequences. Homology may be determined using any of the computer programs and parameters described herein, including BLASTN and TBLASTX with the default parameters. Homologous sequences also include RNA sequences in which uridines replace the thymines in the nucleic acid codes of SEQ ID NOS: 210, 212, 214, 216, 218, 220, 222, 224, 226, 228, 230, 232, 234, 236, 238, 240, 242, 244. The homologous sequences may be obtained using any of the procedures described herein or may result from the correction of a sequencing error. It will be appreciated that the nucleic acid codes of SEQ ID NOS: 210, 212, 214, 216, 218, 220, 222, 224, 226, 228, 230, 232, 234, 236, 238, 240, 242, 244 can be represented in the traditional single character format in which G, A, T and C denote the guanine, adenine, thymine and cytosine bases of the deoxyribonucleic acid (DNA) sequence respectively, or in which G, A, U and C denote the guanine adenine, uracil and cytosine bases of the ribonucleic acid (RNA) sequence (see the inside back cover of Stryer, Biochemistry, 3^{rd} edition, W. H. Freeman & Co., New York) or in any other format which records the identity of the nucleotides in a sequence.

[0131] The term “avilamycin-specific nucleic acid codes” encompass the nucleotide sequences of SEQ ID NOS: 246, 248, 250, 252, 254, 256 and the nucleic acid sequences corresponding to Genbank accession nos. AAG32068, AAK83183, AAG32069, AAK83172, AAK83171 and AAK83175; fragments of SEQ ID NOS: 246, 248, 250, 252, 254, 256 and the nucleic acid sequences corresponding to Genbank accession nos. AAG32068, AAK83183, AAG32069, AAK83172, AAK83171 and AAK83175; nucleotide sequences homologous to SEQ ID NOS: 246, 248, 250, 252, 254, 256 and the nucleic acid sequences corresponding to Genbank accession nos. AAG32068, AAK83183, AAG32069, AAK83172, AAK83171 and AAK83175; or homologous to fragments of SEQ ID NOS: 246, 248, 250, 252, 254, 256 and the nucleic acid sequences corresponding to Genbank accession nos. AAG32068, AAK83183, AAG32069, AAK83172, AAK83171 and AAK83175; and sequences complementary to all of the preceding sequences. The fragments include portions of SEQ ID NOS: 246, 248, 250, 252, 254, 256 and the nucleic acid sequences corresponding to Genbank accession nos. AAG32068, AAK83183, AAG32069, AAK83172, AAK83171 and AAK83175 comprising at least 10, 15, 20, 25, 30, 35, 40, 50, 75, 100, 150, 200, 300, 400 or 500 consecutive nucleotides of SEQ ID NOS: 246, 248, 250, 252, 254, 256 and the nucleic acid sequences corresponding to Genbank accession nos. AAG32068, AAK83183, AAG32069, AAK83172, AAK83171 and AAK83175. Preferably, the fragments are novel fragments. Homologous sequences and fragments of SEQ ID NOS: 246, 248, 250, 252, 254, 256 and the nucleic acid sequences corresponding to Genbank accession nos. AAG32068, AAK83183, AAG32069, AAK83172, AAK83171 and AAK83175 refer to a sequence having at least 99%, 98%, 97%, 96%, 95%, 90%, 80%, 75% or 70% homology to these sequences. Homology may be determined using any of the computer programs and parameters described herein, including BLASTN and TBLASTX with the default parameters. Homologous sequences also include RNA sequences in which uridines replace the thymines in the nucleic acid codes of SEQ ID NOS: 246, 248, 250, 252, 254, 256 and the nucleic acid sequences corresponding to Genbank accession nos. AAG32068, AAK83183, AAG32069, AAK83172, AAK83171 and AAK83175. The homologous sequences may be obtained using any of the procedures described herein or may result from the correction of a sequencing error. It will be appreciated that the nucleic acid codes of SEQ ID NOS: 246, 248, 250, 252, 254, 256 and the nucleic acid sequences corresponding to Genbank accession nos. AAG32068, AAK83183, AAG32069, AAK83172, AAK83171 and AAK83175 can be represented in the traditional single character format in which G, A, T and C denote the guanine, adenine, thymine and cytosine bases of the deoxyribonucleic acid (DNA) sequence respectively, or in which G, A, U and C denote the guanine adenine, uracil and cytosine bases of the ribonucleic acid (RNA) sequence (see the inside back cover of Stryer, Biochemistry, 3^{rd} edition, W. H. Freeman & Co., New York) or in any other format which records the identity of the nucleotides in a sequence.

[0132] “Orthosomycin-specific polypeptide codes” encompass the polypeptide sequences of SEQ ID NOS: 51, 53, 55, 57, 59, 61, 63, 65, 67, 69, 71, 73, 99, 101, 103, 105, 107, 109, 111, 113, 115, 123, 125, 127, 129, 131, 153, 155, 157, 159, 161, 163, 165, 167, 169, 171, 173, 175, 177, 179, 193, 195, 197, 199, 201, 203, 205, 207 which are encoded by the cDNAs of SEQ ID NOS: 52, 54, 56, 58, 60, 62, 64, 66, 68, 70, 72, 74, 100, 102, 104, 106, 108, 110, 112, 114, 116, 124, 126, 128, 130, 132, 154, 156, 158, 160, 162, 164, 166, 168, 170, 172, 174, 176, 178, 180, 194, 196, 198, 200, 202, 204, 206, 208; polypeptide sequences homologous to the polypeptides of SEQ ID NOS: 51, 53, 55, 57, 59, 61, 63, 65, 67, 69, 71, 73, 99, 101, 103, 105, 107, 109, 111, 113, 115, 123, 125, 127, 129, 131, 153, 155, 157, 159, 161, 163, 165, 167, 169, 171, 173, 175, 177, 179, 193, 195, 197, 199, 201, 203, 205, 207, or fragments of any of the preceding sequences. Homologous polypeptide sequences refer to a polypeptide sequence having at least 99%, 98%, 97%, 96%, 95%, 90%, 85%, 80%, 75% or 70% homology to one of the polypeptide sequences of SEQ ID NOS: 51, 53, 55, 57, 59, 61, 63, 65, 67, 69, 71, 73, 99, 101, 103, 105, 107, 109, 111, 113, 115, 123, 125, 127, 129, 131, 153, 155, 157, 159, 161, 163, 165, 167, 169, 171, 173, 175, 177, 179, 193, 195, 197, 199, 201, 203, 205, 207. Polypeptide sequence homology may be determined using any of the computer programs and parameters described herein, including BLASTP version 2.2.2 with the default parameters or with any user-specified parameters. The homologous sequences may be obtained using any of the procedures described herein or may result from the correction of a sequencing error. The polypeptide fragments comprise at least 5, 10, 15, 20, 25, 30, 35, 40, 50, 75, 100 or 150 consecutive polypeptides of the polypeptides of SEQ ID NOS: 51, 53, 55, 57, 59, 61, 63, 65, 67, 69, 71, 73, 99, 101, 103, 105, 107, 109, 111, 113, 115, 123, 125, 127, 129, 131, 153, 155, 157, 159, 161, 163, 165, 167, 169, 171, 173, 175, 177, 179, 193, 195, 197, 199, 201, 203, 205, 207. Preferably the fragments are novel fragments. It will be appreciated that the polypeptide codes of the SEQ ID NOS: 51, 53, 55, 57, 59, 61, 63, 65, 67, 69, 71, 73, 99, 101, 103, 105, 107, 109, 111, 113, 115, 123, 125, 127, 129, 131, 153, 155, 157, 159, 161, 163, 165, 167, 169, 171, 173, 175, 177, 179, 193, 195, 197, 199, 201, 203, 205, 207 can be represented in the traditional single character format or three letter format (see the inside back cover of Stryer, Biochemistry, 3^{rd} edition, W.H. Freeman & Co., New York) or in any other format which relates the identity of the polypeptides in a sequence.

[0133] “Everninomicin-specific polypeptide codes” encompass the polypeptide sequences of SEQ ID NOS: 209, 211, 213, 215, 217, 219, 221, 223, 225, 227, 229, 231, 233, 235, 237, 239, 241 and 243 which are encoded by the cDNAs of SEQ ID NOS: 210, 212, 214, 216, 218, 220, 222, 224, 226, 228, 230, 232, 234, 236, 238, 240, 242, 244 and 244; polypeptide sequences homologous to the polypeptides of SEQ ID NOS: 209, 211, 213, 215, 217, 219, 221, 223, 225, 227, 229, 231, 233, 235, 237, 239, 241 and 243 or fragments of any of the preceding sequences. Homologous polypeptide sequences refer to a polypeptide sequence having at least 99%, 98%, 97%, 96%, 95%, 90%, 85%, 80%, 75% or 70% homology to one of the polypeptide sequences of SEQ ID NOS: 209, 211, 213, 215, 217, 219, 221, 223, 225, 227, 229, 231, 233, 235, 237, 239, 241 and 243. Polypeptide sequence homology may be determined using any of the computer programs and parameters described herein, including BLASTP version 2.2.2 with the default parameters or with any user-specified parameters. The homologous sequences may be obtained using any of the procedures described herein or may result from the correction of a sequencing error. The polypeptide fragments comprise at least 5, 10, 15, 20, 25, 30, 35, 40, 50, 75, 100 or 150 consecutive polypeptides of the polypeptides of SEQ ID NOS: 209, 211, 213, 215, 217, 219, 221, 223, 225, 227, 229, 231, 233, 235, 237, 239, 241 and 243. Preferably the fragments are novel fragments. It will be appreciated that the polypeptide codes of the SEQ ID NOS: 209, 211, 213, 215, 217, 219, 221, 223, 225, 227, 229, 231, 233, 235, 237, 239, 241 and 243 can be represented in the traditional single character format or three letter format (see the inside back cover of Stryer, Biochemistry, 3^{rd} edition, W.H. Freeman & Co., New York) or in any other format which relates the identity of the polypeptides in a sequence.

[0134] “Avilamycin-specific polypeptide codes encompass the polypeptide sequences of SEQ ID NOS: 245, 247, 249, 251, 253, 255 (encoded by the cDNAs of SEQ ID NOS: 246, 248, 250, 252, 254, 256) and the polypeptide sequences of GenBank accession nos: AAG32068, AAK83183, AAG32069, AAK83172, AAK83171 and AAK83175; polypeptide sequences homologous to the polypeptides of SEQ ID NOS: 245, 247, 249, 251, 253, 255 and to GenBank accession nos: AAG32068, AAK83183, AAG32069, AAK83172, AAK83171 and AAK83175 or fragments of any of the preceding sequences. Homologous polypeptide sequences refer to a polypeptide sequence having at least 99%, 98%, 97%, 96%, 95%, 90%, 85%, 80%, 75% or 70% homology to one of the polypeptide sequences of SEQ ID NOS: 245, 247, 249, 251, 253, 255 or to the polypeptides of GenBank accession nos: AAG32068, AAK83183, AAG32069, AAK83172, AAK83171 and AAK83175. Polypeptide sequence homology may be determined using any of the computer programs and parameters described herein, including BLASTP version 2.2.2 with the default parameters or with any user-specified parameters. The homologous sequences may be obtained using any of the procedures described herein or may result from the correction of a sequencing error. The polypeptide fragments comprise at least 5, 10, 15, 20, 25, 30, 35, 40, 50, 75, 100 or 150 consecutive polypeptides of the polypeptides of SEQ ID NOS: 245, 247, 249, 251, 253, 255 or to the polypeptides of GenBank accession nos: AAG32068, AAK83183, AAG32069, AAK83172, AAK83171 and AAK83175. Preferably the fragments are novel fragments. It will be appreciated that the polypeptide codes of SEQ ID NOS: 245, 247, 249, 251, 253, 255 and GenBank accession nos: AAG32068, AAK83183, AAG32069, AAK83172, AAK83171 and AAK83175 can be represented in the traditional single character format or three letter format (see the inside back cover of Stryer, Biochemistry, 3^{rd} edition, W. H. Freeman & Co., New York) or in any other format which relates the identity of the polypeptides in a sequence.

[0135] For ease of comprehension the orthosomycin-specific nucleic acid codes, the everninomicin-specific nucleic acid codes, the avilamycin-specific nucleic acid codes, the orthosomycin-specific polypeptide codes, the everninomicin-specific polypeptide codes and the avilamycin-specific polypeptide codes, or a subset thereof, are sometime collectively referred to as “the reference sequences”.

[0136] It will be readily appreciated by those skilled in the art that the reference sequences can be stored, recorded and manipulated on any medium which can be read and accessed by a computer. As used herein, the words “recorded” and “stored” refer to a process for storing information on a computer medium. A skilled artisan can readily adopt any of the presently known methods for recording information on a computer readable medium to generate manufactures comprising one or more of the the orthosomycin-specific nucleic acid codes, the everninomicin-specific nucleic acid codes, the avilamycin-specific nucleic acid codes, the orthosomycin-specific polypeptide codes, the everninomicin-specific polypeptide codes and the avilamycin-specific polypeptide codes.

[0137] Computer readable media include magnetically readable media, optically readable media, electronically readable media and magnetic/optical media. For example, the computer readable media may be a hard disk, a floppy disk, a magnetic tape, CD-ROM, Digital Versatile Disk (DVD), Random Access Memory (RAM), or Read Only Memory (ROM) as well as other types of media known to those skilled in the art.

[0138] The orthosomycin-specific nucleic acid codes, the everninomicin-specific nucleic acid codes, the avilamycin-specific nucleic acid codes, the orthosomycin-specific polypeptide code, the everninomicin-specific polypeptide code, and the avilamycin-specific polypeptide codes may be stored and manipulated in a variety of data processor programs in a variety of formats. For example, the orthosomycin-specific nucleic acid codes, the everninomicin-specific nucleic acid codes, the avilamycin-specific nucleic acid codes, the orthosomycin-specific polypeptide code, the everninomicin-specific polypeptide code, and the avilamycin-specific polypeptide codes the nucleic acid codes may be stored as ASCII or text in a word processing file, such as MicrosoftWORD or WORDPERFECT in a variety of database programs familiar to those of skill in the art, such as DB2 or ORACLE. In addition, many computer programs and databases may be used as sequence comparers, identifiers or sources of query nucleotide sequences or query polypeptide sequences to be compared to the orthosomycin-specific nucleic acid codes, the everninomicin-specific nucleic acid codes, the avilamycin-specific nucleic acid codes, the orthosomycin-specific polypeptide code, the everninomicin-specific polypeptide code, and the avilamycin-specific polypeptide codes.

[0139] The following list is intended not to limit the invention but to provide guidance to programs and databases which are useful with the orthosomycin-specific nucleic acid codes, the everninomicin-specific nucleic acid codes, the avilamycin-specific nucleic acid codes, the orthosomycin-specific polypeptide code, the everninomicin-specific polypeptide code, and the avilamycin-specific polypeptide codes of the invention. The program and databases which may be used include, but are not limited to: MacPattern (EMBL), DiscoveryBase (Molecular Applications Group), GeneMine (Molecular Applications Group) Look (Molecular Applications Group), MacLook (Molecular Applications Group), BLAST and BLAST2 (NCBI), BLASTN and BLASTX (Altschul et al., J. Mol. Biol. 215:403 (1990)), FASTA (Person and Lipman, Proc. Nalt. Acad. Sci. USA, 85:2444 (1988)), FASTDB (Brutlag et al. Comp. App. Biosci. 6-237-245,1990), Catalyst (Molecular Simulations Inc.), Catalyst/SHAPE (Molecular Simulations Inc.), Cerius².DBAccess (Molecular Simulations Inc.), HypoGen (Molecular Simulations Inc.), Insight II (Molecular Simulations Inc.), Discover (Molecular Simulations Inc.), CHARMm (Molecular Simulations Inc.), Felix (Molecular Simulations Inc.), DelPhi (Molecular Simulations Inc.), QuanteMM (Molecular Simulations Inc.), Homology (Molecular Simulations Inc.), Modeler (Molecular Simulations Inc.), ISIS (Molecular Simulations Inc.), Quanta/Protein Design (Molecular Simulations Inc.), WetLab (Molecular Simulations Inc.), WetLab Diversity Explorer (Molecular Simulations Inc.), Gene Explorer (Molecular Simulations Inc.), SeqFold (Molecular Simulations Inc.), the MDL Available Chemicals Directory database, the MDL Drug Data Report data base, the Comprehensive Medicinal Chemistry database, Derwents' World Drug Index database, the BioByteMasterFile database, the Genbank database, and the Gensyqn database. Many other programs and data bases would be apparent to one of skill in the art given the present disclosure.

[0140] Embodiments of the present invention include systems, particularly computer systems that store and manipulate the sequence information described herein. As used herein, “a computer system”, refers to the hardware components, software components, and data storage components used to analyze the reference sequences.

[0141] Preferably, the computer system is a general purpose system that comprises a processor and one or more internal data storage components for storing data, and one or more data retrieving devices for retrieving the data stored on the data storage components. A skilled artisan can readily appreciate that any one of the currently available computer systems are suitable.

[0142] One example of a computer system is illustrated in FIG. 4. The computer system of FIG. 4 will includes a number of components connected to a central system bus 116, including a central processing unit 118 with internal 118 and external cache memory 120, system memory, 122, display adapter 102 connected to a monitor 100, network adapter 126 which may also be referred to as a network interface, internal modem 124, sound adapter 128, IO controller 132 to which may be connected a keyboard 140 and mouse 138, or other suitable input device such as a trackball or tablet, as well as external printer 134, and/or any number of external devices including but not limited to external modems, tape storage drives, or disk drives. One skilled in the art will readily appreciate that not all components illustrated in FIG. 4 are required to practice the invention and, likewise, additional components not illustrated in in FIG. 4 may be present in a computer system contemplates for use with the invention.

[0143] One or more host bus adapters 114 may be connected to the system bus 116. To host bus adapter 114 may optionally be connected one or more storage devices such as one or more disk drives 112 (removable or fixed), floppy drives 110, tape drives 108, digital versatile disk DVD drives 106, and compact disk CD ROM drives 104. The storage devices may operate in read-only mode and/or in read-write mode. Optical storage such as DVD 106 or CD Rom 104, are more commonly used in read-only mode, and fixed disk drives 112 are more likely to operate in read-write mode. Some computer systems may store large datasets that are larger that an individual disk drive 112, in which case specialized software can be used to allow data to span multiple disks. Examples of such software include but are not limited to Sun Microsystems' Solstice Disk Suite, or Sun Microsystems' RAID (redundant array of inexpensive disks) Manager. The computer system may be enclosed in an enclosure or case. The computer system may optionally include multiple central processing units 118, or multiple banks of memory 122.

[0144] Arrows 142 in FIG. 1 indicate the interconnection of internal components of the computer system. The arrows are illustrative only and do not specify exact connection architecture. Some vendors may connect one or more central processing units to CPU/memory boards which then connect to the system bus.

[0145] Software for accessing and processing the reference sequences (such as sequence comparison software, analysis software as well as search tools, annotation tools, and modeling tools etc.) may reside in main memory 122 during execution.

[0146] In a preferred embodiment, the computer system further comprises a sequence comparison software for comparing the nucleic acid codes of a query sequence stored on a computer readable medium to a subject sequence selected from an orthosomycin-specific nucleic acid code, an everninomicin-specific nucleic acid code, or an avilamycin-specific nucleic acid code which is also stored on a computer readable medium; or for comparing the polypeptide code of a query sequence stored on a computer readable medium to a subject sequence selected from an orthosomycin-specific polypeptide code, an everninomicin-specific polypeptide code, or an avilamycin-specific polypeptide code which is also stored on computer readable medium. A “sequence comparison software” refers to one or more programs that are implemented on the computer system to compare nucleotide sequences with other nucleotide sequences stored within the data storage means. The design of one example of a sequence comparison software is provided in FIG. 2.

[0147] The sequence comparison software will typically employ one or more specialized comparator algorithms. Protein and/or nucleic acid sequence similarities may be evaluated using any of the variety of sequence comparator algorithms and programs known in the art. Such algorithms and programs include, but are no way limited to, TBLASTN, BLASTN, BLASTP, FASTA, TFASTA, CLUSTAL, HMMER, MAST, or other suitable algorithm known to those skilled in the art. (Pearson and Lipman, 1988, Proc. Natl. Acad. Sci USA 85(8):2444-2448; Altschul et al, 1990, J. Mol. Biol. 215(3):403-410; Thompson et al., 1994, Nucleic Acids Res. 22(2):4673-4680; Higgins et al., 1996, Methods Enzymol. 266:383-402; Altschul et al., 1990, J. Mol. Biol. 215(3):403-410; Altschul et al., 1993, Nature Genetics 3:266-272; Eddy S. R., Bioinformatics 14:755-763,1998; Bailey TL et al, J Steroid Biochem Mol Biol 1997 May; 62(1):29-44). One example of a comparator algorithm is illustrated in FIG. 3. Sequence comparator algorithms identified in this specification are particularly contemplated for use in this aspect of the invention.

[0148] The sequence comparison software will typically employ one or more specialized analyzer algorithms. One example of an analyzer algorithm is illustrated in FIG. 4. Any appropriate analyzer algorithm can be used to evaluate similarities, determined by the comparator algorithm, between query/subject pairs and based on context specific rules the annotation of a subject may be assigned to the query. A skilled artisan can readily determine the selection of an appropriate analyzer algorithm and appropriate context specific rules. Analyzer algorithms identified elsewhere in this specification are particularly contemplated for use in this aspect of the invention.

[0149] FIG. 2 is a flowchart of one example of a sequence comparison software for comparing query sequences to a subject sequence. The subject sequence may be selected from the reference sequences, in which case the software determines if a gene or set of genes represented by their nucleotide sequence, polypeptide sequence or other representation is significantly similar to the orthosomycin-specific nucleic acid codes, the everninomicin-specific nucleic acid codes, the avilamycin-specific nucleic acid codes, the orthosomycin-specific polypeptide codes, the everninomicin-specific polypeptide codes or the avilamycin-specific polypeptide codes of the invention. The software may be implemented in the C or C++ programming language, Java, Perl or other suitable programming language known to a person skilled in the art

[0150] Referring to FIG. 2, the query sequence(s) may be accessed by the program by means of input from the user 210, accessing a database 208 or opening a text file 206. The “query initialization process” allows a query sequence to be accessed and loaded into computer memory 122, or under control of the program stored on a disk drive 112 or other storage device in the form of a query sequence array 216. The query array 216 is one or more query nucleotide or polypeptide sequences accompanied by some appropriate identifiers. A dataset is accessed by the program by means of input from the user 228, accessing a database 226, or opening a text file 224. The “subject data source initialization process” of FIG. 2 refers to the method by which a reference dataset containing one or more sequences selected from the orthosomycin-specific nucleic acid code, the everninomicin-specific nucleic acid code, the avilamycin-specific nucleic acid code, the orthosomycin-specific polypeptide code, the everninomicin-specific polypeptide code, and the avilamycin-specific polypeptide code is loaded into computer memory 122, or under control of the program stored on a disk drive 112 or other storage device in the form of a subject array 234. The subject array 234 comprises one or more subject nucleotide or polypeptide sequences accompanied by some appropriate identifiers.

[0151] The “comparison subprocess” of FIG. 2 is the process by which the comparator algorithm 238 is invoked by the software for pairwise comparisons between query elements in the query sequence array 216, and subject elements in the subject array 234. The “comparator algorithm” of FIG. 2 refers to the pairwise comparisons between a query and subject pair from their respective arrays 216, 234. Comparator algorithm 238 may be any algorithm that acts on a query/subject pair, including but not limited to homology algorithms such as BLAST, Smith Waterman, Fasta, or statistical representation/probabilistic algorithms such as Markov models exemplified by HMMER, or other suitable algorithm known to one skilled in the art. Suitable algorithms would generally require a query/subject pair as input and return a score (an indication of likeness between the query and subject), usually through the use of appropriate statistical methods such as Karlin Altschul statistics used in BLAST, Forward or Viterbi algorithms used in Markov models, or other suitable statistics known to those skilled in the art.

[0152] The sequence comparison software of FIG. 2 also comprises a means of analysis of the results of the pairwise comparisons performed by the comparator algorithm 238. The “analysis subprocess” of FIG. 2 is a process by which the analyzer algorithm 244 is invoked by the software. The “analyzer algorithm” refers to a process by which annotation of a subject is assigned to the query based on query/subject similarity as determined by the comparator algorithm 238 according to context-specific rules coded into the program or dynamically loaded at runtime. Context-specific rules are what the program uses to determine if the annotation of the subject can be assigned to the query given the context of the comparison. These rules allow the software to qualify the overall meaning of the results of the comparator algorithm 238.

[0153] In one embodiment, context-specific rules may state that for a set of query sequences to be considered representative of an orthosomycin locus the comparator algorithm 238 must determine that the set of query sequences contain at least one query sequence that shows a statistical similarity to reference sequences corresponding to a nucleic acid sequence code for a polypeptide from two of the groups consisting of: (1) SEQ ID NO: 51; Genbank accession no. AAK83192; SEQ ID NO: 53; SEQ ID NO: 55; and polypeptides having at least 70% homology to a polypeptide having the sequence of SEQ ID NOS: 51, 53, 55 or Genbank accession no. AAK83192; (2) SEQ ID NO: 57; Genbank accession no. AAK83170; SEQ ID NO: 59; SEQ ID NO: 61; and polypeptides having at least 70% homology to a polypeptide having the sequence of SEQ ID NOS: 57, 59, 61 or Genbank accession no. AAK83170; (3) SEQ ID NO: 63, Genbank accession no. AAK83193, SEQ ID NO: 65, SEQ ID NO: 67, and polypeptides having at least 70% homology to a polypeptide having the sequence of SEQ ID NOS: 63, 65, 67 or Genbank accession no. AAK83193; (4) SEQ ID NO: 69, SEQ ID NO: 71, SEQ ID NO: 73, and polypeptides having at least 70% homology to a polypeptide having the sequence of SEQ ID NOS: 69, 71 or 73; (5) SEQ ID NO: 99, Genbank accession no. AAK83184, SEQ ID NO: 101, SEQ ID NO: 103, and polypeptides having at least 70% homology to a polypeptide having the sequence of SEQ ID NOS: 99, 101, 103 or Genbank accession no. AAK83184; (6) SEQ ID NO: 105, Genbank accession no. AAK83186, SEQ ID NO: 107, SEQ ID NO: 109, and polypeptides having at least 70% homology to a polypeptide having the sequence of SEQ ID NOS: 105, 107, 109 or Genbank accession no. AAK83186; (7) SEQ ID NO: 111, Genbank accession no. AAK83188, SEQ ID NO: 113, SEQ ID NO: 115, and polypeptides having at least 70% homology to a polypeptide having the sequence of SEQ ID NOS: 111, 113, 115 or Genbank accession no. AAK83188; (8) SEQ ID NO: 127, Genbank accession no. AAG32067, SEQ ID NO: 129, SEQ ID NO: 131 and polypeptides having at least 70% homology to a polypeptide having the sequence of SEQ ID NOS: 127, 129, 131 or Genbank accession no. AAG32067; (9) SEQ ID NO: 123, Genbank accession no. AAG32066, SEQ ID NO: 125 and polypeptides having at least 70% homology to a polypeptide having the sequence of SEQ ID NOS: 123, 125 or Genbank accession no. AAG32066; (10) SEQ ID NO: 153, Genbank accession no. AAK83187, SEQ ID NO: 155, SEQ ID NO: 157, and polypeptides having at least 70% homology to a polypeptide having the sequence of SEQ ID NOS: 153, 155, 157 or Genbank accession no. AAK83187; (11) SEQ ID NO: 159, SEQ ID NO: 161, SEQ ID NO: 163 and polypeptides having at least 70% homology to a polypeptide having the sequence of SEQ ID NOS: 159, 161 or 163; (12) SEQ ID NO: 167, SEQ ID NO: 173, Genbank accession no. AAK83181, SEQ ID NO: 169 and polypeptides having at least 70% homology to a polypeptide having the sequence of SEQ ID NOS: 167, 169, 173 or Genbank accession no. AAK83181; (13) SEQ ID NO: 175, SEQ ID NO: 177, SEQ ID NO: 179 and polypeptides having at least 70% homology to a polypeptide having the sequence of SEQ ID NOS: 175, 177 or 179; (14) SEQ ID NO: 165, SEQ ID NO: 171, SEQ ID NO: 169 and polypeptides having at least 70% homology to a polypeptide having the sequence of SEQ ID NOS: 165, 169 or 171; (15) SEQ ID NO: 193, Genbank accession no. AAK83189, SEQ ID NO: 195, SEQ ID NO: 197 and polypeptides having at least 70% homology to a polypeptide having the sequence of SEQ ID NOS: 193, 195, 197 or Genbank accession no. AAK83189; and (16) SEQ ID NO: 199, Genbank accession no. AAK83174, SEQ ID NO: 201 and polypeptides having at least 70% homology to a polypeptide having the sequence of SEQ ID NOS: 199, 201 or Genbank accession no. AAK83174; and (17) SEQ ID NO: 203, SEQ ID NO: 205, SEQ ID NO: 207 and polypeptides having at least 70% homology to a polypeptide having the sequence of SEQ ID NOS: 203, 205 or 207. Of course preferred context specific rules may specify a wide variety of thresholds for identifying orthosomycin biosynthetic gene or orthosomycin-producing organism without departing from the scope of the invention. Some preferred thresholds contemplates are that at least one query sequence in the set of query sequences show a statistical similarity to the nucleic acid code corresponding to 3 or 4 or 5 or 6 or 7 or 8 or 10 or more of the above 17 groups polypeptides diagnostic of othosomycin biosynthetic genes. Other preferred context specific rules set the level of homology required in each of the group may be set at 70%, 75%, 80%, 85%, 90%, 95% or 98% in regards to any one or more of the reference sequences.

[0154] In another embodiment context-specific rules may state that for a set of query sequences to be considered representative of an everninomicin-type orthosomycin, the comparator algorithm 238 must determine that at least one of the query sequences in the set of query sequences shows a statistical similarity to reference sequences corresponding to a nucleic acid sequence code for a polypeptide from one of the groups consisting of: (1) SEQ ID NO: 209, SEQ ID NO: 211 and polypeptides having at least 70% homology to a polypeptide of SEQ ID NO: 209 or SEQ ID NO: 211; (2) SEQ ID NO: 213, SEQ ID NO: 215 and polypeptides having at least 70% homology to a polypeptide of SEQ ID NO: 213 or SEQ ID NO: 215; (3) SEQ ID NO: 217, SEQ ID NO: 219 and polypeptides having at least 70% homology to a polypeptide of SEQ ID NO: 217 or SEQ ID NO: 219; (4) SEQ ID NO: 221, SEQ ID NO: 223 and polypeptides having at least 70% homology to a polypeptide of SEQ ID NO: 221 or SEQ ID NO: 223; (5) SEQ ID NO: 225, SEQ ID NO: 227 and polypeptides having at least 70% homology to a polypeptide of SEQ ID NO: 225 or SEQ ID NO: 227; (6) SEQ ID NO: 229, SEQ ID NO: 231 and polypeptides having at least 70% homology to a polypeptide of SEQ ID NO: 229 or SEQ ID NO: 231; (7) SEQ ID NO: 233, SEQ ID NO: 235 and polypeptides having at least 70% homology to a polypeptide of SEQ ID NO: 233 or SEQ ID NO: 235; (8) SEQ ID NO: 237, SEQ ID NO: 239 and polypeptides having at least 70% homology to a polypeptide of SEQ ID NO: 237 or SEQ ID NO: 239; and (9) SEQ ID NO: 241, SEQ ID NO: 243 and polypeptides having at least 70% homology to a polypeptide of SEQ ID NO: 241 or SEQ ID NO: 243. Of course preferred context specific rules may specify a wide variety of thresholds for identifying everninomicin-type orthosomycin biosynthetic genes or everninomicin-type orthosomycin-producing organism without departing from the scope of the invention. Some preferred thresholds contemplates are that at least one query sequence in the set of query sequences show a statistical similarity to the nucleic acid code corresponding to 2 or 3 or 4 or 5 or 6 or 7 or 8 or 9 the above 9 groups polypeptides diagnostic of everninomicin-type othosomycin biosynthetic genes. In a highly preferred embodiment, the set of query sequences would contain at least one query sequence showing a statistical similarity to the nucleic acid code corresponding to 2 or 3 or 4 or 5 or 6 or 7 or 8 or 9 of the 9 groups polypeptides diagnostic of everninomicin biosynthetic gene cluster, together with at least one query sequence in the set of query sequences showing a statistical similarity to the nucleic acid code corresponding to 3 or 4 or 5 or 6 or 7 or 8 or 10 or more of the above 17 groups of polypeptides diagnostic of othosomycin biosynthetic genes. Other preferred context specific rules set level of homology required in each of the group may be at 70%, 75%, 80%, 85%, 90%, 95% or 98% in regards to any one or more of the reference sequences.

[0155] In another embodiment context-specific rules may state that for a set of query sequences to be considered representative of an avilamycin-type orthosomycin locus the comparator algorithm 238 must determine that the set of query sequences contain at least one query sequence that shows a statistical similarity to reference sequences corresponding to a nucleic acid sequence code for a polypeptide from one of the groups consisting of (1) SEQ ID NO: 245, Genbank accession no. AAG32068 and polypeptides having at least 70% homology to a polypeptide of SEQ ID NO: 245 or Genbank accession no. AAG32068; (2) SEQ ID NO: 247, Genbank accession no. AAK83183, and polypeptides having at least 70% homology to a polypeptide of SEQ ID NO: 247 or Genbank accession no. AAK83183; (3) SEQ ID NO: 249, accession no. AAG32069, and polypeptides having at least 70% homology to a polypeptide of SEQ ID NO: 249 or Genbank accession no. AAG32069; (4) SEQ ID NO: 251, Genbank accession no. AAK83172, and polypeptides having at least 70% homology to a polypeptide of SEQ ID NO: 251 or Genbank accession no. AAK83172; (5) SEQ ID NO: 253, Genbank accession no. AAK83171 and polypeptides having at least 70% homology to a polypeptide of SEQ ID NO: 253 or Genbank accession no. AAK83171; (6) SEQ ID NO: 255, Genbank accession no. AAK83175, and polypeptides having at least 70% homology to a polypeptide of SEQ ID NO: 255 or Genbank accession no. AAK83175. Of course preferred context specific rules may specify a wide variety of thresholds for identifying an avilamycin-type orthosomycin biosynthetic gene or an avilamycin-type orthosomycin-producing organism without departing from the scope of the invention. Some preferred thresholds contemplates are that at least one query sequence in the set of query sequences show a statistical similarity to the nucleic acid code corresponding to 2, 3 or 4 or 5 or 6 of the above groups polypeptides diagnostic of avilamycin-type othosomycin biosynthetic genes. In a highly preferred embodiment, the set of query sequences would contain at least one query sequence showing a statistical similarity to the nucleic acid code corresponding to 2 or 3 or 4 or 5 or 6 groups polypeptides diagnostic of avilamycin-type biosynthetic gene cluster, together with at least one query sequence in the set of query sequences showing a statistical similarity to the nucleic acid code corresponding to 3 or 4 or 5 or 6 or 7 or 8 or 10 or more of the above 17 groups of polypeptides diagnostic of othosomycin biosynthetic genes. Other preferred context specific rules set the level of homology required in each of the group may at 70%, 75%, 80%, 85%, 90%, 95% or 98% in regards to any one or more of the reference sequences.

[0156] Thus, the analysis subprocess may be employed in conjunction with any other context specific rules and may be adapted to suit different embodiments. The principal function of the analyzer algorithm 244 is to assign meaning or a diagnosis to a query or set of queries based on context specific rules that are application specific and may be changed without altering the overall role of the analyzer algorithm 244.

[0157] Finally the sequence comparison software of FIG. 2 comprises a means of returning of the results of the comparisons by the comparator algorithm 238 and analyzed by the analyzer algorithm 244 to the user or process that requested the comparison or comparisons. The “display/report subprocess” of FIG. 2 is the process by which the results of the comparisons by the comparator algorithm 238 and analyses by the analyzer algorithm 244 are returned to the user or process that requested the comparison or comparisons. The results 240, 246 may be written to a file 252, displayed in some user interface such as a console, custom graphical interface, web interface, or other suitable implementation specific interface, or uploaded to some database such as a relational database, or other suitable implementation specific database.

[0158] Once the results have been returned to the user or process that requested the comparison or comparisons the program exits.

[0159] The principle of the sequence comparison software of FIG. 2 is to receive or load a query or queries, receive or load a reference dataset, then run a pairwise comparison by means of the comparator algorithm 238, then evaluate the results using an analyzer algorithm 244 to arrive at a determination if the query or queries bear significant similarity to the reference sequences, and finally return the results to the user or calling program or process.

[0160] FIG. 3 is a flow diagram illustrating one embodiment of a comparator algorithm 238 process in a computer for determining whether two sequences are homologous. The comparator algorithm receives a query/subject pair for comparison, performs an appropriate comparison, and returns the pair along with a calculated degree of similarity.

[0161] Referring to FIG. 3, the comparison is initiated at the beginning of sequences 304. A match of (x) characters is attempted 306 where (x) is a user specified number. If a match is not found the query sequence is advanced 316 by one polypeptide with respect to the subject, and if the end of the query has not been reached 318 another match of (x) characters is attempted 306. Thus if no match has been found the query is incrementally advanced in entirety past the initial position of the subject, once the end of the query is reached 318, the subject pointer is advanced by 1 polypeptide and the query pointer is set to the beginning of the query 318. If the end of the subject has been reached and still no matches have been found a null homology result score is assigned 324 and the algorithm returns the pair of sequences along with a null score to the calling process or program. The algorithm then exits 326. If instead a match is found 308, an extension of the matched region is attempted 310 and the match is analyzed statistically 312. The extension may be unidirectional or bidirectional. The algorithm continues in a loop extending the matched region and computing the homology score, giving penalties for mismatches taking into consideration that given the chemical properties of the polypeptide side chains not all mismatches are equal. For example a mismatch of a lysine with an arginine both of which have basic side chains receive a lesser penalty than a mismatch between lysine and glutamate which has an acidic side chain. The extension loop stops once the accumulated penalty exceeds some user specified value, or of the end of either sequence is reached 312. The maximal score is stored 314, and the query sequence is advanced 316 by one polypeptide with respect to the subject, and if the end of the query has not been reached 318 another match of (x) characters is attempted 306. The process continues until the entire length of the subject has been evaluated for matches to the entire length of the query. All individual scores and alignments are stored 314 by the algorithm and an overall score is computed 324 and stored. The algorithm returns the pair of sequences along with local and global scores to the calling process or program. The algorithm then exits 326.

[0162] Comparator algorithm 238 algorithm may be represented in pseudocode as follows:

| | |
|---|---|
| INPUT: | Q[m]: query, m is the length |
| | S[n]: subject, n is the length |

| | |
|---|---|
| x: | x is the size of a segment |

START:
for each i in [1,n] do

for each j in [1,m] do

if ( j + x − 1 ) <= m and ( i + x −1 ) <= n then

if Q(j, j+x−1) = S(i, i+x−1) then

k=1;
while Q(j, j+x−1+k ) = S(i, i+x−1+ k) do

k++;

Store highest local homology

Compute overall homology score
Return local and overall homology scores
END.

[0163] The comparator algorithm 238 may be written for use on nucleotide sequences, in which case the scoring scheme would be implemented so as to calculate scores and apply penalties based on the chemical nature of nucleotides. The comparator algorithm 238 may also provide for the presence of gaps in the scoring method for nucleotide or polypeptide sequences.

[0164] BLAST is one implementation of the comparator algorithm 238. HMMER is another implementation of the comparator algorithm 238 based on Markov model analysis. In a HMMER implementation a query sequence would be compared to a mathematical model representative of a subject sequence or sequences rather than using sequence homology.

[0165] FIG. 4 is a flow diagram illustrating an analyzer algorithm 244 process for detecting the presence of an orthosomycin biosynthetic locus, an everninomicin-type orthosomycin biosynthetic locus or an avilamycin-type orthosomycin biosynthetic locus. The analyzer algorithm of FIG. 4 may be used in the process by which the annotation of a subject is assigned to the query based on their similarity as determined by the comparator algorithm 238 and according to context-specific rules coded into the program or dynamically loaded at runtime. Context sensitive rules are what determines if the annotation of the subject can be assigned to the query given the context of the comparison. Context specific rules set the thresholds for determining the level and quality of similarity that would be accepted in the process of evaluating matched pairs.

[0166] The analyzer algorithm 244 receives as its input an array of pairs that had been matched by the comparator algorithm 238. The array consists of at least a query identifier, a subject identifier and the associated value of the measure of their similarity. To determine if a group of query sequences includes an sequences diagnostic of an avilamycin-type orthosomycin biosynthetic gene cluster, a reference or diagnostic array 406 is generated by accessing a data source and retrieving avilamycin specific information 404 relating to avilamycin-specific nucleic acid codes and avilamycin-specific polypeptide codes. Diagnostic array 406 consists at least of subject identifiers and their associated annotation. Annotation may include reference to the nine protein families diagnostic of avilamycin-type biosynthetic genes clusters, i.e. ABCD, DEPN, MEMD, REBU, UNAI and UNBR. Annotation may also include information regarding exclusive presence in loci of a specific structural class or may include previously computed matches to other databases, for example databases of motifs. Once the algorithm has successfully generated or received the two necessary arrays 402, 406, and holds in memory any context specific rules, each matched pair as determined by the comparator algorithm 238 can be evaluated. The algorithm will perform an evaluation 408 of each matched pair and based on the context specific rules confirm or fail to confirm the match as valid 410. In cases of successful confirmation of the match 410 the annotation of the subject is assigned to the query. Results of each comparison are stored 412. The loop ends when the end of the query/subject array is reached. Once all query/subject pairs have been evaluated against avilamycin-specific nucleic acid codes and avilamycin-specific polypeptide codes, a final determination can be made if the query set of ORFs represents an aviiamycin locus 416.

[0167] The algorithm then returns the overall diagnosis and an array of characterized query/subject pairs along with supporting evidence to the calling program or process and then terminates 418.

[0168] The analyzer algorithm 244 may be configured to dynamically load different diagnostic arrays and context specific rules. It may be used for example in the comparison of query/subject pairs with diagnostic subjects for other biosynthetic pathways, such as everninomicin-specific nucleic acid codes or everninomicin-specific polypeptide codes, or other sets of annotated subjects.

[0169] The present invention will be further described with reference to the following examples; however, it is to be understood that the present invention is not limited to such examples.

### EXAMPLE 1

### Identification of the Everninomicin Biosynthetic Locus in Micromonospora carbonacea var. aurantiaca

[0170] The microorganism Micromonospora carbonacea var. aurantiaca NRRL 2997 was obtained from the Agriculture Research Service Culture Collection of the United States Department of Agriculture, 1815 N. University Street, Peoria, Ill. 61604. The everninomicin compound produced by strain NRRL 2997 is described in U.S. Pat. No. 3,499,078. The biosynthetic locus for everninomicin was identified from strain NRRL 2997 (EVER) according to the method described in Canadian patent application CA 2,352,451. The sequences obtained from cosmids containing overlapping genomic inserts spanning the biosynthetic locus for everninomicin were identified. Within the sequences of the cosmid inserts, numerous ORFs encoding polypeptides having homology to known proteins were identified. Homology was determined using the program BLASTP version 2.2.2 with the default parameters. Contiguous nucleotide sequences and deduced amino acid sequences of EVER are provided. EVER is formed of three contiguous DNA sequences (SEQ ID NOS: 280, 281 and 282) which are arranged such that, as found within the EVER, the 3′ end of DNA contig 1 (SEQ ID NO: 280) is adjacent to the 5′ end of DNA contig 2 (SEQ ID NO: 281), which in turn is adjacent to the 5′ end of DNA contig 3 SEQ ID NO: 282). The ORFs present in EVER encode 50 polypeptides, the sequences of which are provided as follows: The amino acid sequence of ORF 1 (SEQ ID NO 263) is deduced from the nucleic acid sequence of SEQ ID NO 264 drawn from contig 1 (SEQ ID NO 280). The amino acid sequence of ORF 2 (SEQ ID NO 89) is deduced from the nucleic acid sequence of SEQ ID NO 90 drawn from contig 1 (SEQ ID NO 280). The amino acid sequence of ORF 3 (SEQ ID NO 225) is deduced from the nucleic acid sequence of SEQ ID NO 226 drawn from contig 1 (SEQ ID NO 280). The amino acid sequence of ORF 4 (SEQ ID NO 237) is deduced from the nucleic acid sequence of SEQ ID NO 238 drawn from contig 1 (SEQ ID NO 280). The amino acid sequence of ORF 5 (SEQ ID NO 113) is deduced from the nucleic acid sequence of SEQ ID NO 114 drawn from contig 1 (SEQ ID NO 280). The amino acid sequence of ORF 6 (SEQ ID NO 119) is deduced from the nucleic acid sequence of SEQ ID NO 120 drawn from contig 1 (SEQ ID NO 280). The amino acid sequence of ORF 7 (SEQ ID NO 49) is deduced from the nucleic acid sequence of SEQ ID NO 50 drawn from contig 1 (SEQ ID NO 280). The amino acid sequence of ORF 8 (SEQ ID NO 65) is deduced from the nucleic acid sequence of SEQ ID NO 66 drawn from contig 1 (SEQ ID NO 280). The amino acid sequence of ORF 9 (SEQ ID NO 201) is deduced from the nucleic acid sequence of SEQ ID NO 202 drawn from contig 1 (SEQ ID NO 280). The amino acid sequence of ORF 10 (SEQ ID NO 15) is deduced from the nucleic acid sequence of SEQ ID NO 16 drawn from contig 1 (SEQ ID NO 280). The amino acid sequence of ORF 11 (SEQ ID NO 95) is deduced from the nucleic acid sequence of SEQ ID NO 96 drawn from contig 1 (SEQ ID NO 280). The amino acid sequence of ORF 12 (SEQ ID NO 71) is deduced from the nucleic acid sequence of SEQ ID NO 72 drawn from contig 1 (SEQ ID NO 280). The amino acid sequence of ORF 13 (SEQ ID NO 125) is deduced from the nucleic acid sequence of SEQ ID NO 126 drawn from contig 1 (SEQ ID NO 280). The amino acid sequence of ORF 14 (SEQ ID NO 83) is deduced from the nucleic acid sequence of SEQ ID NO 84 drawn from contig 1 (SEQ ID NO 280). The amino acid 'sequence of ORF 15 (SEQ ID NO 101) is deduced from the nucleic acid sequence of SEQ ID NO 102 drawn from contig 1 (SEQ ID NO 280). The amino acid sequence of ORF 16 (SEQ ID NO 47) is deduced from the nucleic acid sequence of SEQ ID NO 48 drawn from contig 1 (SEQ ID NO 280). The amino acid sequence of ORF 17 (SEQ ID NO 195) is deduced from the nucleic acid sequence of SEQ ID NO 196 drawn from contig 1 (SEQ ID NO 280). The amino acid sequence of ORF 18 (SEQ ID NO 155) is deduced from the nucleic acid sequence of SEQ ID NO 156 drawn from contig 1 (SEQ ID NO 280). The amino acid sequence of ORF 19 (SEQ ID NO 107) is deduced from the nucleic acid sequence of SEQ ID NO 108 drawn from contig 1 (SEQ ID NO 280). The amino acid sequence of ORF 20 (SEQ ID NO 77) is deduced from the nucleic acid sequence of SEQ ID NO 78 drawn from contig 1 (SEQ ID NO 280). The amino acid sequence of ORF 21 (SEQ ID NO 221) is deduced from the nucleic acid sequence of SEQ ID NO 222 drawn from contig 1 (SEQ ID NO 280). The amino acid sequence of ORF 22 (SEQ ID NO 151) is deduced from the nucleic acid sequence of SEQ ID NO 152 drawn from contig 1 (SEQ ID NO 280). The amino acid sequence of ORF 23 (SEQ ID NO 143) is deduced from the nucleic acid sequence of SEQ ID NO 144 drawn from contig 1 (SEQ ID NO 280). The amino acid sequence of ORF 24 (SEQ ID NO 53) is deduced from the nucleic acid sequence of SEQ ID NO 54 drawn from contig 1 (SEQ ID NO 280). The amino acid sequence of ORF 25 (SEQ ID NO 205) is deduced from the nucleic acid sequence of SEQ ID NO 206 drawn from contig 1 (SEQ ID NO 280). The amino acid sequence of ORF 26 (SEQ ID NO 161) is deduced from the nucleic acid sequence of SEQ ID NO 162 drawn from contig 1 (SEQ ID NO 280). The amino acid sequence of ORF 27 (SEQ ID NO 257) is deduced from the nucleic acid sequence of SEQ ID NO 258 drawn from contig 1 (SEQ ID NO 280). The amino acid sequence of ORF 28 (SEQ ID NO 135) is deduced from the nucleic acid sequence of SEQ ID NO 136 drawn from contig 1 (SEQ ID NO 280). The amino acid sequence of ORF 29 (SEQ ID NO 3) is deduced from the nucleic acid sequence of SEQ ID NO 4 drawn from contig 1 (SEQ ID NO 280). The amino acid sequence of ORF 30 (SEQ ID NO 35) is deduced from the nucleic acid sequence of SEQ ID NO 36 drawn from contig 1 (SEQ ID NO 280). The amino acid sequence of ORF 31 (SEQ ID NO 169) is deduced from the nucleic acid sequence of SEQ ID NO 170 drawn from contig 1 (SEQ ID NO 280). The amino acid sequence of ORF 32 (SEQ ID NO 183) is deduced from the nucleic acid sequence of SEQ ID NO 184 drawn from contig 1 (SEQ ID NO 280). The amino acid sequence of ORF 33 (SEQ ID NO 177) is deduced from the nucleic acid sequence of SEQ ID NO 178 drawn from contig 1 (SEQ ID NO 280). The amino acid sequence of ORF 34 (SEQ ID NO 29) is deduced from the nucleic acid sequence of SEQ ID NO 30 drawn from contig 1 (SEQ ID NO 280). The amino acid sequence of ORF 35 (SEQ ID NO 59) is deduced from the nucleic acid sequence of SEQ ID NO 60 drawn from contig 1 (SEQ ID NO 280). The amino acid sequence of ORF 36 (SEQ ID NO 189) is deduced from the nucleic acid sequence of SEQ ID NO 190 drawn from contig 1 (SEQ ID NO 280). The amino acid sequence of ORF 37 (SEQ ID NO 141) is deduced from the nucleic acid sequence of SEQ ID NO 142 drawn from contig 1 (SEQ ID NO 280). The amino acid sequence of ORF 38 (SEQ ID NO 41) is deduced from the nucleic acid sequence of SEQ ID NO 42 drawn from contig 1 (SEQ ID NO 280). The amino acid sequence of ORF 39 (SEQ ID NO 9) is deduced from the nucleic acid sequence of SEQ ID NO 10 drawn from contig 1 (SEQ ID NO 280). The amino acid sequence of ORF 40 (SEQ ID NO 129) is deduced from the nucleic acid sequence of SEQ ID NO 130 drawn from contig 1 (SEQ ID NO 280). As indicated in Table II-B, the sequence of ORF 41 provided herein contains a gap. The amino acid sequence of ORF 41, C-terminus (SEQ ID NO 23) is deduced from the nucleic acid sequence of SEQ ID NO 24 drawn from contig 1 (SEQ ID NO 280). The amino acid sequence of ORF 41, N-terminus (SEQ ID NO 21) is deduced from the nucleic acid sequence of SEQ ID NO 22 drawn from contig 2 (SEQ ID NO 281). The amino acid sequence of ORF 42, C-terminus only (SEQ ID NO 233) is deduced from the nucleic acid sequence of SEQ ID NO 234 drawn from contig 3 (SEQ ID NO 282). The amino acid sequence of ORF 43 (SEQ ID NO 209) is deduced from the nucleic acid sequence of SEQ ID NO 210 drawn from contig 3 (SEQ ID NO 282). The amino acid sequence of ORF 44 (SEQ ID NO 229) is deduced from the nucleic acid sequence of SEQ ID NO 230 drawn from contig 3 (SEQ ID NO 282). The amino acid sequence of ORF 45 (SEQ ID NO 217) is deduced from the nucleic acid sequence of SEQ ID NO 218 drawn from contig 3 (SEQ ID NO 282). The amino acid sequence of ORF 46 (SEQ ID NO 213) is deduced from the nucleic acid sequence of SEQ ID NO 214 drawn from contig 3 (SEQ ID NO 282). The amino acid sequence of ORF 47 (SEQ ID NO 241) is deduced from the nucleic acid sequence of SEQ ID NO 242 drawn from contig 3 (SEQ ID NO 282). The amino acid sequence of ORF 48 (SEQ ID NO 259) is deduced from the nucleic acid sequence of SEQ ID NO 260 drawn from contig 3 (SEQ ID NO 282). The amino acid sequence of ORF 49 (SEQ ID NO 267) is deduced from the nucleic acid sequence of SEQ ID NO 268 drawn from contig 3 (SEQ ID NO 282). The amino acid sequence of ORF 50 (SEQ ID NO 261) is deduced from the nucleic acid sequence of SEQ ID NO 262 drawn from contig 3 (SEQ ID NO 282).

[0171] The ORFs in EVER have been assigned a putative function and protein family designation based on homology to known proteins as indicated in Table II-A. The position, length and orientation of each EVER ORF within SEQ ID NOS: 280, 281 and 282 is provided in Table II-B.

TABLE II-A
EVER blast table

| ORF | Family | #aa | GenBank homology | probability | % identity | % similarity | proposed function of GenBank match |
|---|---|---|---|---|---|---|---|
| 1 | MTBA | 250 | AAG23269.1, 250aa | 5e−89 | 150/249 (60.24%) | 188/249 (75.5%) | probable O-methyltransferase, |
| | | | | | | | Saccharopolyspora spinosa |
| | | | CAC32469.1, 261aa | 4e−83 | 147/249 (59.06%) | 185/249 (74.3%) | O-methyltransferase, Streptomyces olivaceus |
| | | | AAD41819.1, 256aa | 8e−82 | 139/250 (55.6%) | 181/250 (72.4%) | macrocin-O-methyltransferase, |
| | | | | | | | Streptomyces fradiae |
| 2 | MEMK | 442 | CAC48373.1, 452aa | 2e−84 | 186/439 (42.37%) | 239/439 (54.44%) | putative antiporter, |
| | | | | | | | Amycolatopsis mediterranei |
| | | | NP_103653.1, 737aa | 1e−38 | 96/397 (24.18%) | 185/397 (46.6%) | Na/H antiporter, Mesorhizobium loti |
| | | | NP_440311.1, 410aa | 4e−25 | 72/270 (26.67%) | 130/270 (48.15%) | Na/H antiporter, Synechocystis sp. |
| 3 | MTFG | 362 | AAL02176.1, 341aa | 9e−06 | 65/292 (22.26%) | 111/292 (38.01%) | rRNA methyltransferase, Enterococcus faecium |
| 4 | OXCO | 489 | AAK61713.1, 475aa | 2e−99 | 198/460 (43.04%) | 263/460 (57.17%) | oxidoreductase-like protein, Streptomyces |
| | | | | | | | aureofaciens |
| | | | AAL82808.1, 431aa | 3e−86 | 178/381 (46.72%) | 225/381 (59.06%) | JadZ, Streptomyces venezuelae |
| | | | Q12737, 572aa | 2e−65 | 173/501 (34.53%) | 250/501 (49.9%) | Bilirubin oxidase precursor, Myrothecium |
| | | | | | | | verrucaria |
| 5 | MTFF | 274 | AAK83188.1, 277aa | 2e−81 | 155/270 (57.41%) | 176/270 (65.19%) | AviG3, Streptomyces viridochromogenes |
| 6 | MTFV | 429 | AAK83176.1, 407aa | 2e−78 | 180/406 (44.33%) | 232/406 (57.14%) | methyltransferase, Streptomyces |
| | | | | | | | viridochromogenes |
| | | | AAD41823.1, 418aa | 7e−78 | 179/407 (43.98%) | 228/407 (56.02%) | NDP-hexose 3-C-methyltransferase, |
| | | | | | | | Streptomyces fradiae |
| 7 | MTFH | 394 | AAD12164.1, 395aa | 1e−77 | 157/342 (45.91%) | 205/342 (59.94%) | methyltransferase, |
| | | | | | | | Streptomyces fradiae |
| | | | AAG23270.1, 395aa | 3e−75 | 148/333 (44.44%) | 197/333 (59.16%) | probable O-methyltransferase, |
| | | | | | | | Saccharopolyspora spinosa |
| | | | CAC32466.1, 378aa | 4e−72 | 156/314 (49.68%) | 185/314 (58.92%) | O-methyltransferase, Streptomyces olivaceus |
| 8 | GTFH | 339 | AAK83193.1, 342aa | 6e−92 | 174/342 (50.88%) | 221/342 (64.62%) | putative glycosyltransferase, |
| | | | | | | | Streptomyces viridochromogenes |
| | | | NP_102448.1, 353aa | 2e−09 | 80/313 (25.56%) | 122/313 (38.98%) | probable sugar transferase, |
| | | | | | | | Mesorhizobium loti |
| 9 | UEVB | 137 | AAK83174.1, 136aa | 6e−62 | 102/133 (76.69%) | 122/133 (91.73%) | AviX10, Streptomyces viridochromogenes |
| 10 | DEPG | 314 | T46669, 328aa | 1e−38 | 113/309 (36.57%) | 142/309 (45.95%) | probable dTDP-4-keto-6-deoxyhexose |
| | | | | | | | reductase, Streptomyces nogalater |
| | | | AAB63047.1, 307aa | 2e−32 | 99/305 (32.46%) | 137/305 (44.92%) | thymidine diphospho-4-keto-2,3,6- |
| | | | | | | | trideoxyhexulose reductase, Streptomyces |
| | | | | | | | peucetius |
| | | | AAF72549.1, 346aa | 7e−31 | 107/318 (33.65%) | 135/318 (42.45%) | NDP-hexose 4-ketoreductase, |
| | | | | | | | Streptomyces fradiae |
| 11 | MTFA | 342 | P42712, 376aa | 1e−58 | 132/333 (39.64%) | 176/333 (52.85%) | O-demethylpuromycin-O-methyltransferase, |
| | | | | | | | Streptomyces alboniger |
| | | | BAA32132.1, 305aa | 2e−55 | 123/301 (40.86%) | 152/301 (50.5%) | Orf4, Streptomyces griseus |
| | | | CAB76315.1, 342aa | 3e−31 | 96/322 (29.81%) | 149/322 (46.27%) | putative O-methyltransferase., |
| | | | | | | | Streptomyces coelicolor |
| 12 | HOXG | 276 | | | | | No homolog by blastp in GenBank nr |
| | | | | | | | protein database |
| 13 | MTIA | 265 | AAG32066.1, 287aa | 2e−73 | 145/266 (54.51%) | 188/266 (70.68%) | rRNA methyltransferase, Streptomyces |
| | | | | | | | viridochromogenes |
| | | | NP_294741.1, 265aa | 3e−27 | 89/247 (36.03%) | 128/247 (51.82%) | rRNA methylase, Deinococcus radiodurans |
| | | | NP_104368.1, 274aa | 1e−26 | 83/248 (33.47%) | 128/248 (51.61%) | rRNA methylase, Mesorhizobium loti |
| 14 | KASA | 344 | AAK83178.1, 343aa | 1e−127 | 226/345 (65.51%) | 265/345 (76.81%) | AviN, Streptomyces viridochromogenes |
| | | | AAG29787.1, 355aa | 3e−77 | 153/346 (44.22%) | 207/346 (59.83%) | 3-ketoacyl-ACP-synthase, |
| | | | | | | | Streptomyces rishiriensis |
| | | | CAB71914.1, 346aa | 9e−69 | 139/343 (40.52%) | 200/343 (58.31%) | hypothetical protein, Streptomyces coelicolor |
| 15 | MTFD | 240 | AAK83184.1, 240aa | 4e−72 | 135/235 (57.45%) | 168/235 (71.49%) | putative methyltransferase, |
| | | | | | | | Streptomyces viridochromogenes |
| | | | CAA70016.1, 253aa | 3e−04 | 40/119 (33.61%) | 50/119 (42.02%) | methyltransferase, Streptomyces griseus |
| 16 | GTFA | 438 | AAK83182.1, 430aa | 1e−167 | 280/428 (65.42%) | 336/428 (78.5%) | putative glycosyltransferase, |
| | | | | | | | Streptomyces viridochromogenes |
| | | | T46681, 411aa | 4e−59 | 146/416 (35.1%) | 213/416 (51.2%) | probable glycosyltransferase, |
| | | | | | | | Streptomyces nogalater |
| | | | AAC64928.1, 393aa | 1e−43 | 132/405 (32.59%) | 184/405 (45.43%) | glycosyltransferase, Streptomyces argillaceus |
| 17 | UEVA | 405 | AAK83189.1, 396aa | 1e−164 | 271/391 (69.31%) | 306/391 (78.26%) | AviX12, Streptomyces viridochromogenes |
| 18 | OXRV | 313 | AAK83187.1, 314aa | 1e−132 | 221/301 (73.42%) | 247/301 (82.06%) | putative oxygenase, Streptomyces |
| | | | | | | | viridochromogenes |
| | | | AAK83181.1, 223aa | 1e−08 | 60/218 (27.52%) | 89/218 (40.83%) | putative oxygenase, Streptomyces |
| | | | | | | | viridochromogenes |
| | | | NP_521770.1, 263aa | 9e−07 | 66/228 (28.95%) | 89/228 (39.04%) | probable hydroxylase, Ralstonia solanacearum |
| 19 | MTFE | 243 | AAK83186.1, 239aa | 2e−72 | 136/227 (59.91%) | 160/227 (70.48%) | putative methyltransferase, Streptomyces |
| | | | | | | | viridochromogenes |
| | | | NP_419820.1, 453aa | 7e−08 | 52/188 (27.66%) | 81/188 (43.09%) | hypothetical protein, Caulobacter crescentus |
| 20 | HOXM | 481 | T30590, 491aa | 3e−55 | 147/470 (31.28%) | 236/470 (50.21%) | alkylhalidase homolog, Amycolatopsis |
| | | | | | | | orientalis |
| | | | CAA76550.1, 491aa | 4e−55 | 147/470 (31.28%) | 234/470 (49.79%) | halogenase, Amycolatopsis mediterranei |
| | | | AAK81830.1, 497aa | 9e−53 | 146/466 (31.33%) | 232/466 (49.79%) | non-heme halogenase, |
| | | | | | | | Streptomyces lavendulae |
| 21 | GTFA | 380 | AAD13553.1, 373aa | 2e−75 | 163/378 (43.12%) | 222/378 (58.73%) | glycosyl transferase homolog, |
| | | | | | | | Streptomyces cyanogenus |
| | | | AAF00209.1, 365aa | 6e−75 | 160/366 (43.72%) | 208/366 (56.83%) | glycosyl transferase, Streptomyces fradiae |
| | | | T46519, 382aa | 3e−67 | 162/383 (42.3%) | 209/383 (54.57%) | probable glycosyl transferase, |
| | | | | | | | Streptomyces violaceoruber |
| 22 | OXRU | 325 | AAK83190.1, 334aa | 6e−94 | 181/324 (55.86%) | 204/324 (62.96%) | putative pyruvate dehydrogenase, |
| | | | | | | | Streptomyces viridochromogenes |
| | | | NP_342958.1, 332aa | 1e−49 | 113/261 (43.3%) | 145/261 (55.56%) | pyruvate dehydrogenase, alpha subunit, |
| | | | | | | | Sulfolobus solfataricus |
| | | | NP_252839.1, 324aa | 3e−47 | 108/265 (40.75%) | 138/265 (52.08%) | probable dehydrogenase E1 |
| | | | | | | | component, Pseudomonas aeruginosa |
| 23 | OXRT | 320 | AAK83191.1, 320aa | 1e−138 | 247/320 (77.19%) | 275/320 (85.94%) | putative pyruvate dehydrogenase, |
| | | | | | | | Streptomyces viridochromogenes |
| | | | NP_342959.1, 324aa | 3e−59 | 133/325 (40.92%) | 195/325 (60%) | pyruvate dehydrogenase, beta subunit, |
| | | | | | | | Sulfolobus solfataricus |
| | | | NP_252840.1, 339aa | 6e−53 | 134/332 (40.36%) | 183/332 (55.12%) | acetoin catabolism protein, |
| | | | | | | | Pseudomonas aeruginosa |
| 24 | GTFE | 337 | AAK83192.1, 338aa | 1e−139 | 234/310 (75.48%) | 258/310 (83.23%) | putative glycosyltransferase, |
| | | | | | | | Streptomyces viridochromogenes |
| | | | NP_488533.1, 295aa | 1e−22 | 78/251 (31.08%) | 113/251 (45.02%) | probable glycosyltransferase, |
| | | | | | | | Nostoc sp. PCC 7120 |
| | | | NP_126869.1, 352aa | 2e−18 | 65/206 (31.55%) | 101/206 (49.03%) | rhamnosyl transferase related protein, |
| | | | | | | | Pyrococcus abyssi |
| 25 | UNKU | 350 | | | | | No homolog by blastp in GenBank nr |
| | | | | | | | protein database |
| 26 | OXRW | 252 | AAK83181.1, 223aa | 9e−14 | 70/236 (29.66%) | 103/236 (43.64%) | putative oxygenase, |
| | | | | | | | Streptomyces viridochromogenes |
| | | | AAF01812.1, 267aa | 8e−13 | 65/230 (28.26%) | 95/230 (41.3%) | SnoK, Streptomyces nogalater |
| | | | AAC71711.1, 286aa | 2e−11 | 54/228 (23.68%) | 98/228 (42.98%) | putative alpha-ketoglutarate-dependent |
| | | | | | | | hypophosphite dioxygenase, |
| | | | | | | | Pseudomonas stutzeri |
| 27 | DEPD | 309 | NP_254140.1, 323aa | 3e−46 | 123/320 (38.44%) | 171/320 (53.44%) | GDP-mannose 4,6-dehydratase, |
| | | | | | | | Pseudomonas aeruginosa |
| | | | NP_419826.1, 325aa | 6e−46 | 119/319 (37.3%) | 166/319 (52.04%) | GDP-mannose 4,6-dehydratase, |
| | | | | | | | Caulobacter crescentus |
| | | | AAC44117.1, 323aa | 5e−44 | 120/320 (37.5%) | 167/320 (52.19%) | GCA, Pseudomonas aeruginosa |
| 28 | NUTA | 355 | A26984, 355aa | 1e−127 | 216/353 (61.19%) | 276/353 (78.19%) | strD protein, Streptomyces griseus |
| | | | T30872, 355aa | 1e−125 | 214/354 (60.45%) | 279/354 (78.81%) | dNDP-glucose synthase, Streptomyces |
| | | | | | | | viridochromogenes |
| | | | AAD28517.1, 355aa | 1e−124 | 210/353 (59.49%) | 275/353 (77.9%) | BlmD, Streptomyces bluensis |
| 29 | DEPA | 329 | T30873, 355aa | 1e−139 | 239/319 (74.92%) | 265/319 (83.07%) | dNDP-glucose dehydratase, Streptomyces |
| | | | | | | | viridochromogenes |
| | | | AAG18457.1, 332aa | 1e−123 | 217/325 (66.77%) | 249/325 (76.62%) | AprE, Streptomyces tenebranus |
| | | | AAC68681.1, 337aa | 1e−115 | 207/329 (62.92%) | 247/329 (75.08%) | TDP-glucose-4,6-dehydratase, Streptomyces |
| | | | | | | | venezuelae |
| 30 | DEPJ | 342 | AAK83179.1, 342aa | 1e−157 | 268/342 (78.36%) | 293/342 (85.67%) | putative NDP-glucose 4-epimerase, |
| | | | | | | | Streptomyces viridochromogenes |
| | | | NP_228319.1, 309aa | 2e−40 | 113/305 (37.05%) | 155/305 (50.82%) | UDP-glucose 4-epimerase, putative, |
| | | | | | | | Thermotoga maritima |
| | | | NP_252757.1, 309aa | 4e−34 | 109/303 (35.97%) | 147/303 (48.51%) | probable epimerase, Pseudomonas aeruginosa |
| 31 | OXRX | 450 | AAK83181.1, 223aa | 5e−84 | 155/209 (74.16%) | 170/209 (81.34%) | putative oxygenase, Streptomyces |
| | | | | | | | viridochromogenes |
| | | | AAK83180.1, 199aa | 3e−64 | 124/198 (62.63%) | 143/198 (72.22%) | putative methyltransferase, Streptomyces |
| | | | | | | | viridochromogenes |
| | | | AAF01812.1, 267aa | 1e−10 | 57/212 (26.89%) | 90/212 (42.45%) | SnoK, Streptomyces nogalater |
| 32 | PKSO | 1267 | T30871, 1293aa | 0.0 | 758/1269 (59.73%) | 878/1269 (69.19%) | orsellinic acid synthase, Streptomyces |
| | | | | | | | viridochromogenes |
| | | | AAC49814.1, 1803aa | 0.0 | 452/1184 (38.18%) | 647/1184 (54.65%) | polyketide synthase, Aspergillus terreus |
| | | | AAK48943.1, 1778aa | 0.0 | 455/1194 (38.11%) | 639/1194 (53.52%) | 6-methylsalicylic acid synthase, |
| | | | | | | | Byssochlamys nivea |
| 33 | PHOD | 249 | NP_444200.1, 257aa | 9e−06 | 38/117 (32.48%) | 55/117 (47.01%) | p-nitrophenyl phosphatase, |
| | | | | | | | Halobacterium sp. |
| | | | AAG19324.1, 212aa | 9e−06 | 38/117 (32.48%) | 55/117 (47.01%) | p-nitrophenyl phosphatase; Pho2, |
| | | | | | | | Halobacterium sp. |
| 34 | DEPI | 307 | AAD45554.1, 312aa | 5e−53 | 125/288 (43.4%) | 160/288 (55.56%) | Spcl, Streptomyces netropsis |
| | | | NP_301272.1, 319aa | 8e−24 | 106/324 (32.72%) | 142/324 (43.83%) | putative sugar-nucleotide dehydratase, |
| | | | | | | | Mycobacterium leprae |
| | | | NP_228319.1, 309aa | 5e−23 | 86/303 (28.38%) | 136/303 (44.88%) | UDP-glucose 4-epimerase, putative, |
| | | | | | | | Thermotoga maritime |
| 35 | GTFG | 295 | AAK83170.1, 240aa | 3e−68 | 129/194 (66.49%) | 148/194 (76.29%) | putative glycosyltransferase, Streptomyces |
| | | | | | | | viridochromogenes |
| 36 | REBV | 82 | AAK83173.1, 192aa | 3e−23 | 51/76 (67.11%) | 63/76 (82.89%) | putative response regulator, Streptomyces |
| | | | | | | | viridochromogenes |
| | | | AAF71781.1, 210aa | 4e−22 | 47/70 (67.14%) | 63/70 (90%) | ORF4, Streptomyces noursei |
| | | | BAB69313.1, 232aa | 2e−19 | 44/70 (62.86%) | 57/70 (81.43%) | transcription regulatory protein, |
| | | | | | | | Streptomyces avermitilis |
| 37 | OXRA | 341 | AAF73453.1, 329aa | 3e−75 | 149/314 (47.45%) | 186/314 (59.24%) | putative 3-ketoreductase; AknQ, |
| | | | | | | | Streptomyces galilaeus |
| | | | AAA83425.2, 346aa | 5e−72 | 144/331 (43.5%) | 193/331 (58.31%) | RdmF, Streptomyces purpurascens |
| | | | AAD13550.1, 321aa | 1e−72 | 149/318 (46.86%) | 183/318 (57.55%) | oxidoreductase homolog, |
| | | | | | | | Streptomyces cyanogenus |
| 38 | DHYA | 470 | AAF59932.1, 474aa | 1e−122 | 246/480 (51.25%) | 303/480 (63.13%) | dTDP-4-keto-6-deoxyglucose |
| | | | | | | | 2,3-dehydratase, Streptomyces |
| | | | | | | | antibioticus |
| | | | CAB96551.1, 486aa | 1e−119 | 229/452 (50.66%) | 283/452 (62.61%) | D-olivose, D-oliose and D-mycarose 2,3- |
| | | | | | | | dehydratase, Streptomyces argillaceus |
| | | | AAG52988.1, 473aa | 1e−118 | 225/444 (50.68%) | 286/444 (64.41%) | Rif18, Amycolatopsis mediterranei |
| 39 | DEPE | 346 | CAC20923.1, 343aa | 1e−123 | 214/329 (65.05%) | 262/329 (79.64%) | PimJ protein, Streptomyces natalensis |
| | | | AAF71765.1, 344aa | 1e−120 | 209/330 (63.33%) | 258/330 (78.18%) | NysDIII, Streptomyces noursei |
| | | | AAK73500.1, 344aa | 1e−121 | 209/330 (63.33%) | 264/330 (80%) | AmphDIII, Streptomyces nodosus |
| 40 | MTLA | 254 | AAG32067.1, 250aa | 1e−37 | 93/249 (37.35%) | 116/249 (46.59%) | rRNA methyl transferase, Streptomyces |
| | | | | | | | viridochromogenes |
| 41 | DEPH | 160 | AAK83169.1, 322aa | 8e−43 | 90/159 (56.6%) | 105/159 (66.04%) | putative UDP-glucose 4-epimerase, |
| | | | | | | | Streptomyces viridochromogenes |
| | | | NP_228319.1, 309aa | 2e−30 | 70/162 (43.21%) | 98/162 (60.49%) | UDP-glucose 4-epimerase, putative, |
| | | | | | | | Thermotoga maritime |
| | | | NP_218151.1, 314aa | 1e−26 | 71/167 (42.51%) | 93/167 (55.69%) | rmlB2, Mycobacterium tuberculosis H37Rv |
| 42 | OXBN | 400 | S39965, 406aa | 7e−92 | 178/369 (48.24%) | 227/369 (61.52%) | hypothetical protein, Streptomyces griseus |
| | | | AAB63045.1, 342aa | 6e−44 | 100/216 (46.3%) | 118/216 (54.63%) | putative flavoprotein, Streptomyces peucetius |
| | | | NP_388333.1, 381aa | 1e−20 | 93/358 (25.98%) | 149/358 (41.62%) | similar to butyryl-CoA dehydrogenase, |
| | | | | | | | Bacillus subtilis |
| 43 | DATC | 375 | T30592, 369aa | 1e−150 | 263/373 (70.51%) | 297/373 (79.62%) | hypothetical protein, Amycolatopsis orientalis |
| | | | BAB72037.1, 369aa | 1e−146 | 262/373 (70.24%) | 289/373 (77.48%) | AclZ, Streptomyces galilaeus |
| | | | CAC48376.1, 369aa | 1e−146 | 255/373 (68.36%) | 292/373 (78.28%) | putative C-3 amino transferase, |
| | | | | | | | Amycolatopsis mediterranei |
| 44 | MTFV | 416 | CAC48364.1, 408aa | 1e−159 | 273/401 (68.08%) | 324/401 (80.8%) | putative C-3 methyl transferase, |
| | | | | | | | Amycolatopsis mediterranei |
| | | | AAC38444.1, 403aa | 1e−152 | 264/395 (66.84%) | 311/395 (78.73%) | daunorubicin/doxorubicin biosynthesis |
| | | | | | | | enzyme, Streptomyces peucetius |
| | | | AAB49295.1, 215aa | 7e−82 | 140/209 (66.99%) | 174/209 (83.25%) | hypothetical hydroxylase b, |
| | | | | | | | Amycolatopsis orientalis |
| 45 | EPIM | 207 | AAB63046.1, 208aa | 1e−60 | 114/194 (58.76%) | 136/194 (70.1%) | putative epimerase, Streptomyces peucetius |
| | | | S39966, 212aa | 2e−59 | 113/194 (58.25%) | 137/194 (70.62%) | hypothetical protein, Streptomyces griseus |
| | | | CAC48377.1, 205aa | 5e−59 | 110/198 (55.56%) | 140/198 (70.71%) | putative 3, 5 epimerase, |
| | | | | | | | Amycolatopsis mediterranei |
| 46 | DEPF | 369 | AAL14256.1, 325aa | 6e−64 | 138/312 (44.23%) | 170/312 (54.49%) | NDP-4-keto-6-deoxyhexose |
| | | | | | | | 4-ketoreductase, Streptomyces |
| | | | | | | | venezuelae |
| | | | AAG13913.1, 328aa | 5e−62 | 139/320 (43.44%) | 172/320 (53.75%) | TDP-4-keto-6-deoxyhexose 4-ketoreductase, |
| | | | | | | | Micromonospora megalomicea subsp. nigra |
| | | | BAA84595.1, 343aa | 9e−60 | 141/321 (43.93%) | 171/321 (53.27%) | dTDP-4-keto-6-deoxy-L-hexose 4-reductase, |
| | | | | | | | Streptomyces avermitilis |
| 47 | UNBB | 306 | | | | | No homolog by blastp in GenBank nr |
| | | | | | | | protein database |
| 48 | ENGA | 517 | P27035, 459aa | 3e−30 | 116/473 (24.52%) | 190/473 (40.17%) | endoglucanase, Streptomyces lividans |
| | | | CAC16970.1, 486aa | 4e−29 | 121/476 (25.42%) | 191/476 (40.13%) | putative secreted endoglucanase, |
| | | | | | | | Streptomyces coelicolor |
| | | | A55976, 596aa | 3e−25 | 61/113 (53.98%) | 70/113 (61.95%) | cellulose 1,4-beta-cellobiosidase, |
| | | | | | | | Thermomonospora fusca |
| 49 | REGL | 286 | T37231, 342aa | 9e−51 | 120/275 (43.64%) | 152/275 (55.27%) | probable transcription regulator, |
| | | | | | | | Streptomyces coelicolor |
| | | | CAB61919.1, 349aa | 2e−49 | 114/277 (41.16%) | 151/277 (54.51%) | putative lacl-family transcriptional regulator, |
| | | | | | | | Streptomyces coelicolor |
| | | | CAB56686.1, 347aa | 2e−40 | 105/279 (37.63%) | 138/279 (49.46%) | putative Lacl family transcriptional regulator, |
| | | | | | | | Streptomyces coelicolor |
| 50 | KINB | 423 | CAB65576.1, 406aa | 3e−37 | 109/274 (39.78%) | 134/274 (48.91%) | putative transcriptional regulatory protein, |
| | | | | | | | Streptomyces coelicolor |
| | | | NP_243624.1, 386aa | 2e−34 | 83/249 (33.33%) | 132/249 (53.01%) | transcriptional repressor, |
| | | | | | | | Bacillus halodurans |
| | | | T35673, 403aa | 4e−33 | 92/261 (35.25%) | 135/261 (51.72%) | probable transcription repressor, |
| | | | | | | | Streptomyces coelicolor |

NOTE:
For segmented ORF 41, only the N-terminal fragment was considered to generate this blast table.

[0172] TABLE II-B

| | | START (bp) . . . | LENGTH | | |
|---|---|---|---|---|---|
| EVER | ORF | END (bp) | (aa) | ORIENTATION | INTEGRITY |
| Contig 1 | 1 | 753 . . . 1 | 250 | NEGATIVE | COMPLETE |
| | 2 | 1533 . . . 2861 | 442 | POSITIVE | COMPLETE |
| | 3 | 2967 . . . 4055 | 362 | POSITIVE | COMPLETE |
| | 4 | 5529 . . . 4060 | 489 | NEGATIVE | COMPLETE |
| | 5 | 6174 . . . 6998 | 274 | POSITIVE | COMPLETE |
| | 6 | 6995 . . . 8284 | 429 | POSITIVE | COMPLETE |
| | 7 | 8281 . . . 9465 | 394 | POSITIVE | COMPLETE |
| | 8 | 9472 . . . 10491 | 339 | POSITIVE | COMPLETE |
| | 9 | 10607 . . . 11020 | 137 | POSITIVE | COMPLETE |
| | 10 | 12020 . . . 11076 | 314 | NEGATIVE | COMPLETE |
| | 11 | 13089 . . . 12061 | 342 | NEGATIVE | COMPLETE |
| | 12 | 13912 . . . 13082 | 276 | NEGATIVE | COMPLETE |
| | 13 | 14812 . . . 14015 | 265 | NEGATIVE | COMPLETE |
| | 14 | 15177 . . . 16211 | 344 | POSITIVE | COMPLETE |
| | 15 | 17099 . . . 16377 | 240 | NEGATIVE | COMPLETE |
| | 16 | 18415 . . . 17099 | 438 | NEGATIVE | COMPLETE |
| | 17 | 19900 . . . 18683 | 405 | NEGATIVE | COMPLETE |
| | 18 | 20858 . . . 19917 | 313 | NEGATIVE | COMPLETE |
| | 19 | 21589 . . . 20858 | 243 | NEGATIVE | COMPLETE |
| | 20 | 23031 . . . 21586 | 481 | NEGATIVE | COMPLETE |
| | 21 | 23345 . . . 24487 | 380 | POSITIVE | COMPLETE |
| | 22 | 24565 . . . 25542 | 325 | POSITIVE | COMPLETE |
| | 23 | 25547 . . . 26509 | 320 | POSITIVE | COMPLETE |
| | 24 | 26557 . . . 27570 | 337 | POSITIVE | COMPLETE |
| | 25 | 27567 . . . 28619 | 350 | POSITIVE | COMPLETE |
| | 26 | 29397 . . . 28639 | 252 | NEGATIVE | COMPLETE |
| | 27 | 29752 . . . 30681 | 309 | POSITIVE | COMPLETE |
| | 28 | 30879 . . . 31946 | 355 | POSITIVE | COMPLETE |
| | 29 | 31946 . . . 32935 | 329 | POSITIVE | COMPLETE |
| | 30 | 32990 . . . 34018 | 342 | POSITIVE | COMPLETE |
| | 31 | 34073 . . . 35425 | 450 | POSITIVE | COMPLETE |
| | 32 | 39383 . . . 35580 | 1267 | NEGATIVE | COMPLETE |
| | 33 | 39863 . . . 40612 | 249 | POSITIVE | COMPLETE |
| | 34 | 40609 . . . 41532 | 307 | POSITIVE | COMPLETE |
| | 35 | 42398 . . . 41511 | 295 | NEGATIVE | COMPLETE |
| | 36 | 42708 . . . 42460 | 82 | NEGATIVE | COMPLETE |
| | 37 | 44557 . . . 43532 | 341 | NEGATIVE | COMPLETE |
| | 38 | 45966 . . . 44554 | 470 | NEGATIVE | COMPLETE |
| | 39 | 47003 . . . 45963 | 346 | NEGATIVE | COMPLETE |
| | 40 | 47971 . . . 47207 | 254 | NEGATIVE | COMPLETE |
| | 41 | 48221 . . . 48070 | 49 | NEGATIVE | C-TERMINUS ONLY |
| Contig 2 | 41 | 480 . . . 1 | 160 | NEGATIVE | N-TERMINUS ONLY |
| Contig 3 | 42 | 1 . . . 1203 | 400 | POSITIVE | C-TERMINUS ONLY |
| | 43 | 1200 . . . 2327 | 375 | POSITIVE | COMPLETE |
| | 44 | 2357 . . . 3607 | 416 | POSITIVE | COMPLETE |
| | 45 | 3616 . . . 4239 | 207 | POSITIVE | COMPLETE |
| | 46 | 5169 . . . 4060 | 369 | NEGATIVE | COMPLETE |
| | 47 | 6086 . . . 5166 | 306 | NEGATIVE | COMPLETE |
| | 48 | 7811 . . . 6261 | 517 | NEGATIVE | COMPLETE |
| | 49 | 8746 . . . 7889 | 286 | NEGATIVE | COMPLETE |
| | 50 | 10035 . . . 8764 | 423 | NEGATIVE | COMPLETE |

### EXAMPLE 2

### Identification of a Biosynthetic Locus for an Avilamycin-Type Compound from Streptomyces mobaraensis

[0173] The microorganism Streptomyces mobarensis strain NRRL B-3729 was obtained from the Agriculture Research Service Culture Collection of the United States Department of Agriculture. Streptomyces mobarensis was not previously reported to produce an avilamycin-type compound or orthosomycins in general. A biosynthetic locus for an avilamycin-type compound in Streptomyces mobarensis (AVIA) was identified using the method described in Canadian patent application CA 2,352,451. The sequences obtained from cosmids containing overlapping genomic inserts spanning the biosynthetic locus for everninomicin were identified. Within the sequences of the cosmid inserts, numerous ORFs encoding polypeptides having homology to known proteins were identified. Homology was determined using the program BLASTP version 2.2.2 with the default parameters. A contiguous nucleotide sequence spanning AVIA and deduced amino acid sequences of AVIA are provided as follows: The amino acid sequence of ORF 1 (SEQ ID NO 123) is deduced from the nucleic acid sequence of SEQ ID NO 124 drawn from contig 1 (SEQ ID NO 277). The amino acid sequence of ORF 2 (SEQ ID NO 203) is deduced from the nucleic acid sequence of SEQ ID NO 204 drawn from contig 1 (SEQ ID NO 277). The amino acid sequence of ORF 3 (SEQ ID NO 127) is deduced from the nucleic acid sequence of SEQ ID NO 128 drawn from contig 1 (SEQ ID NO 277). The amino acid sequence of ORF 4 (SEQ ID NO 19) is deduced from the nucleic acid sequence of SEQ ID NO 20 drawn from contig 1 (SEQ ID NO 277). The amino acid sequence of ORF 5 (SEQ ID NO 57) is deduced from the nucleic acid sequence of SEQ ID NO 58 drawn from contig 1 (SEQ ID NO 277). The amino acid sequence of ORF 6 (SEQ ID NO 253) is deduced from the nucleic acid sequence of SEQ ID NO 254 drawn from contig 1 (SEQ ID NO 277). The amino acid sequence of ORF 7 (SEQ ID NO 251) is deduced from the nucleic acid sequence of SEQ ID NO 252 drawn from contig 1 (SEQ ID NO 277). The amino acid sequence of ORF 8 (SEQ ID NO 187) is deduced from the nucleic acid sequence of SEQ ID NO 188 drawn from contig 1 (SEQ ID NO 277). The amino acid sequence of ORF 9 (SEQ ID NO 199) is deduced from the nucleic acid sequence of SEQ ID NO 200 drawn from contig 1 (SEQ ID NO 277). The amino acid sequence of ORF 10 (SEQ ID NO 255) is deduced from the nucleic acid sequence of SEQ ID NO 256 drawn from contig 1 (SEQ ID NO 277). The amino acid sequence of ORF 11 (SEQ ID NO 117) is deduced from the nucleic acid sequence of SEQ ID NO 118 drawn from contig 1 (SEQ ID NO 277). The amino acid sequence of ORF 12 (SEQ ID NO 87) is deduced from the nucleic acid sequence of SEQ ID NO 88 drawn from contig 1 (SEQ ID NO 277). The amino acid sequence of ORF 13 (SEQ ID NO 81) is deduced from the nucleic acid sequence of SEQ ID NO 82 drawn from contig 1 (SEQ ID NO 277). The amino acid sequence of ORF 14 (SEQ ID NO 181) is deduced from the nucleic acid sequence of SEQ ID NO 182 drawn from contig 1 (SEQ ID NO 277). The amino acid sequence of ORF 15 (SEQ ID NO 133) is deduced from the nucleic acid sequence of SEQ ID NO 134 drawn from contig 1 (SEQ ID NO 277). The amino acid sequence of ORF 16 (SEQ ID NO 1) is deduced from the nucleic acid sequence of SEQ ID NO 2 drawn from contig 1 (SEQ ID NO 277). The amino acid sequence of ORF 17 (SEQ ID NO 33) is deduced from the nucleic acid sequence of SEQ ID NO 34 drawn from contig 1 (SEQ ID NO 277). The amino acid sequence of ORF 18 (SEQ ID NO 165) is deduced from the nucleic acid sequence of SEQ ID NO 166 drawn from contig 1 (SEQ ID NO 277). The amino acid sequence of ORF 19 (SEQ ID NO 167) is deduced from the nucleic acid sequence of SEQ ID NO 168 drawn from contig 1 (SEQ ID NO 277). The amino acid sequence of ORF 20 (SEQ ID NO 45) is deduced from the nucleic acid sequence of SEQ ID NO 46 drawn from contig 1 (SEQ ID NO 277). The amino acid sequence of ORF 21 (SEQ ID NO 247) is deduced from the nucleic acid sequence of SEQ ID NO 248 drawn from contig 1 (SEQ ID NO 277). The amino acid sequence of ORF 22 (SEQ ID NO 99) is deduced from the nucleic acid sequence of SEQ ID NO 100 drawn from contig 1 (SEQ ID NO 277). The amino acid sequence of ORF 23 (SEQ ID NO 105) is deduced from the nucleic acid sequence of SEQ ID NO 106 drawn from contig 1 (SEQ ID NO 277). The amino acid sequence of ORF 24 (SEQ ID NO 153) is deduced from the nucleic acid sequence of SEQ ID NO 154 drawn from contig 1 (SEQ ID NO 277). The amino acid sequence of ORF 25 (SEQ ID NO 111) is deduced from the nucleic acid sequence of SEQ ID NO 112 drawn from contig 1 (SEQ ID NO 277). The amino acid sequence of ORF 26 (SEQ ID NO 193) is deduced from the nucleic acid sequence of SEQ ID NO 194 drawn from contig 1 (SEQ ID NO 277). The amino acid sequence of ORF 27 (SEQ ID NO 245) is deduced from the nucleic acid sequence of SEQ ID NO 246 drawn from contig 1 (SEQ ID NO 277). The amino acid sequence of ORF 28 (SEQ ID NO 249) is deduced from the nucleic acid sequence of SEQ ID NO 250 drawn from contig 1 (SEQ ID NO 277). The amino acid sequence of ORF 29 (SEQ ID NO 149) is deduced from the nucleic acid sequence of SEQ ID NO 150 drawn from contig 1 (SEQ ID NO 277). The amino acid sequence of ORF 30 (SEQ ID NO 145) is deduced from the nucleic acid sequence of SEQ ID NO 146 drawn from contig 1 (SEQ ID NO 277). The amino acid sequence of ORF 31 (SEQ ID NO 51) is deduced from the nucleic acid sequence of SEQ ID NO 52 drawn from contig 1 (SEQ ID NO 277). The amino acid sequence of ORF 32 (SEQ ID NO 63) is deduced from the nucleic acid sequence of SEQ ID NO 64 drawn from contig 1 (SEQ ID NO 277). The amino acid sequence of ORF 33 (SEQ ID NO 159) is deduced from the nucleic acid sequence of SEQ ID NO 160 drawn from contig 1 (SEQ ID NO 277). The amino acid sequence of ORF 34 (SEQ ID NO 175) is deduced from the nucleic acid sequence of SEQ ID NO 176 drawn from contig 1 (SEQ ID NO 277). The amino acid sequence of ORF 35 (SEQ ID NO 27) is deduced from the nucleic acid sequence of SEQ ID NO 28 drawn from contig 1 (SEQ ID NO 277). The amino acid sequence of ORF 36 (SEQ ID NO 75) is deduced from the nucleic acid sequence of SEQ ID NO 76 drawn from contig 1 (SEQ ID NO 277). The amino acid sequence of ORF 37 (SEQ ID NO 69) is deduced from the nucleic acid sequence of SEQ ID NO 70 drawn from contig 1 (SEQ ID NO 277). The amino acid sequence of ORF 38 (SEQ ID NO 93) is deduced from the nucleic acid sequence of SEQ ID NO 94 drawn from contig 1 (SEQ ID NO 277). The amino acid sequence of ORF 39 (SEQ ID NO 7) is deduced from the nucleic acid sequence of SEQ ID NO 8 drawn from contig 1 (SEQ ID NO 277). The amino acid sequence of ORF 40 (SEQ ID NO 39) is deduced from the nucleic acid sequence of SEQ ID NO 40 drawn from contig 1 (SEQ ID NO 277). The amino acid sequence of ORF 41 (SEQ ID NO 139) is deduced from the nucleic acid sequence of SEQ ID NO 140 drawn from contig 1 (SEQ ID NO 277). The amino acid sequence of ORF 42 (SEQ ID NO 13) is deduced from the nucleic acid sequence of SEQ ID NO 14 drawn from contig 1 (SEQ ID NO 277). The ORFs in AVIA have been assigned a putative function and protein family designation based on homology to known proteins as indicated in Table III-A. The position, length and orientation of each AVIA ORF within SEQ ID NO: 277 is provided in Table III-B

TABLE III-A
AVIA blast table

| ORF | Family | #aa | GenBank homology | probability | | | |
|---|---|---|---|---|---|---|---|
| 1 | MTIA | 285 | AAG32066.1, 287aa | 1e−133 | 234/273 (85.71%) | 246/273 (90.11%) | rRNA methyltransferase, |
| | | | | | | | Streptomyces viridochromogenes |
| | | | NP_540715.1, 297aa | 4e−24 | 82/257 (31.91%) | 125/257 (48.64%) | 23S ribosomal RNA methyltransferase, |
| | | | | | | | Brucella melitensis |
| | | | NP_336137.1, 260aa | 1e−22 | 80/268 (29.85%) | 125/268 (46.64%) | rRNA methylase, putative, |
| | | | | | | | Mycobacterium tuberculosis |
| 2 | UNKU | 343 | | | | | No homolog by blastp in GenBank nr |
| | | | | | | | protein database |
| 3 | MTLA | 250 | AAG32067.1, 250aa | 2e−88 | 170/236 (72.03%) | 181/236 (76.69%) | rRNA methyl transferase, |
| | | | | | | | Streptomyces viridochromogenes |
| 4 | DEPH | 320 | AAK83169.1, 322aa | 1e−149 | 265/320 (82.81%) | 277/320 (86.56%) | putative UDP-glucose 4-epimerase, |
| | | | | | | | Streptomyces viridochromogenes |
| | | | NP_228319.1, 309aa | 3e−62 | 133/303 (43.89%) | 180/303 (59.41%) | UDP-glucose 4-epimerase, putative, |
| | | | | | | | Thermotoga maritima pir |
| | | | NP_247180.1, 305aa | 1e−60 | 132/305 (43.28%) | 184/305 (60.33%) | UDP-glucose 4-epimerase (galE), |
| | | | | | | | Methanococcus jannaschii |
| 5 | GTFG | 294 | AAK83170.1, 240aa | 1e−94 | 170/193 (88.08%) | 181/193 (93.78%) | putative glycosyltransferase, |
| | | | | | | | Streptomyces viridochromogenes |
| | | | NP_487216.1, 313aa | 1e−05 | 58/221 (26.24%) | 84/221 (38.01%) | probable glycosyl transferase, |
| | | | | | | | Nostoc sp. |
| | | | AAB88894.1, 327aa | 5e−04 | 54/218 (24.77%) | 84/218 (38.53%) | putative glycosyl transferase, |
| | | | | | | | Rhizobium leguminosarum |
| 6 | UNAI | 356 | AAK83171.1, 355aa | 1e−173 | 294/355 (82.82%) | 316/355 (89.01%) | AviX9, Streptomyces |
| | | | | | | | viridochromogenes |
| | | | CAB61298.1, 391aa | 3e−25 | 86/265 (32.45%) | 126/265 (47.55%) | hypothetical protein, |
| | | | | | | | Streptomyces coelicolor |
| 7 | REBU | 99 | AAK83172.1, 206aa | 8e−26 | 60/65 (92.31%) | 61/65 (93.85%) | putative two-component regulator, |
| | | | | | | | Streptomyces viridochromogenes |
| | | | NP_372408.1, 209aa | 5e−10 | 29/61 (47.54%) | 45/61 (73.77%) | two-component response regulator, |
| | | | | | | | Staphylococcus aureus |
| | | | T36862, 210aa | 4e−09 | 31/62 (50%) | 42/62 (67.74%) | probable two-component response |
| | | | | | | | regulator, Streptomyces coelicolor |
| 8 | REBV | 158 | AAK83173.1, 192aa | 4e−38 | 77/87 (88.51%) | 83/87 (95.4%) | putative response regulator, |
| | | | | | | | Streptomyces viridochromogenes |
| | | | AAF71781.1, 210aa | 2e−18 | 44/82 (53.66%) | 62/82 (75.61%) | ORF4, Streptomyces noursei |
| | | | BAB69313.1, 232aa | 3e−16 | 40/73 (54.79%) | 54/73 (73.97%) | transcription regulatory protein, |
| | | | | | | | Streptomyces avermitilis |
| 9 | UEVB | 136 | AAK83174.1, 136aa | 1e−75 | 126/135 (93.33%) | 134/135 (99.26%) | AviX10, Streptomyces viridochromogenes |
| 10 | UNBR | 249 | AAK83175.1, 231aa | 1e−114 | 195/216 (90.28%) | 205/216 (94.91%) | AviX11, Streptomyces viridochromogenes |
| 11 | MTFV | 407 | AAK83176.1, 407aa | 0.0 | 361/407 (88.7%) | 379/407 (93.12%) | methyltransferase, Streptomyces |
| | | | | | | | viridochromogenes |
| | | | AAD41823.1, 418aa | 1e−142 | 261/409 (63.81%) | 297/409 (72.62%) | NDP-hexose 3-C-methyltransferase, |
| | | | | | | | Streptomyces fradiae |
| 12 | MEMK | 456 | AAK83177.1, 476aa | 1e−141 | 268/397 (67.51%) | 286/397 (72.04%) | putative transporter, Streptomyces |
| | | | | | | | viridochromogenes |
| | | | NP_440311.1, 410aa | 1e−49 | 125/380 (32.89%) | 186/380 (48.95%) | Na/H antiporter, Synechocystis sp. |
| | | | AAL79755.1, 780aa | 8e−45 | 125/379 (32.98%) | 175/379 (46.17%) | putative ion antiporter, Oryza sativa |
| 13 | KASA | 344 | AAK83178.1, 343aa | 1e−163 | 292/346 (84.39%) | 305/346 (88.15%) | AviN, Streptomyces viridochromogenes |
| | | | AAG29787.1, 355aa | 4e−75 | 151/337 (44.81%) | 202/337 (59.94%) | 3-ketoacyl-ACP-synthase, Streptomyces |
| | | | | | | | rishiriensis |
| | | | CAB71914.1, 346aa | 3e−67 | 135/345 (39.13%) | 202/345 (58.55%) | hypothetical protein, Streptomyces coelicolor |
| 14 | PKSO | 1284 | T30871, 1293aa | 0.0 | 1002/1293 (77.49%) | 1049/1293 (81.13%) | orsellinic acid synthase, Streptomyces |
| | | | | | | | viridochromogenes |
| | | | BAA20102.1, 1800aa | 0.0 | 439/1214 (36.16%) | 601/1214 (49.51%) | 6-methylsalicylic acid synthase, Aspergillus |
| | | | | | | | terreus |
| | | | AAK48943.1, 1778aa | 0.0 | 420/1170 (35.9%) | 589/1170 (50.34%) | 6-methylsalicylic acid synthase, Byssochlamys |
| | | | | | | | nivea |
| 15 | NUTA | 355 | T30872, 355aa | 1e−178 | 314/354 (88.7%) | 338/354 (95.48%) | dNDP-glucose synthase, |
| | | | | | | | Streptomyces viridochromogenes |
| | | | A26984, 355aa | 1e−122 | 223/353 (63.17%) | 269/353 (76.2%) | strD protein, Streptomyces griseus |
| | | | T48866, 355aa | 1e−120 | 216/353 (61.19%) | 265/353 (75.07%) | glucose-1-phosphate thymidylyltransferase, |
| | | | | | | | Streptomyces argillaceus |
| 16 | DEPA | 346 | T30873, 355aa | 1e−176 | 305/337 (90.5%) | 313/337 (92.88%) | dNDP-glucose dehydratase, Streptomyces |
| | | | | | | | viridochromogenes |
| | | | AAG18457.1, 332aa | 1e−117 | 212/329 (64.44%) | 242/329 (73.56%) | AprE, Streptomyces tenebrarius |
| | | | AAD31797.1, 330aa | 1e−115 | 206/328 (62.8%) | 240/328 (73.17%) | TDP-glucose-4,6-dehydratase, Streptomyces |
| | | | | | | | spectabilis |
| 17 | DEPJ | 342 | AAK83179.1, 342aa | 0.0 | 321/342 (93.86%) | 325/342 (95.03%) | putative NDP-glucose 4-epimerase, |
| | | | | | | | Streptomyces viridochromogenes |
| | | | NP_252757.1, 309aa | 1e−38 | 113/302 (37.42%) | 156/302 (51.66%) | probable epimerase, |
| | | | | | | | Pseudomonas aeruginosa |
| | | | NP_228319.1, 309aa | 9e−43 | 113/305 (37.05%) | 166/305 (54.43%) | UDP-glucose 4-epimerase, |
| | | | | | | | putative, Thermotoga maritima |
| 18 | UNAJ | 222 | AAK83180.1, 199aa | 2e−88 | 162/198 (81.82%) | 174/198 (87.88%) | putative methyltransferase, |
| | | | | | | | Streptomyces viridochromogenes |
| 19 | OXRW | 223 | AAK83181.1, 223aa | 1e−106 | 190/223 (85.2%) | 192/223 (86.1%) | putative oxygenase, |
| | | | | | | | Streptomyces viridochromogenes |
| 20 | GTFA | 430 | AAK83182.1, 430aa | 0.0 | 390/430 (90.7%) | 410/430 (95.35%) | putative glycosyltransferase, |
| | | | | | | | Streptomyces viridochromogenes |
| | | | T46681, 411aa | 9e−67 | 159/415 (38.31%) | 218/415 (52.53%) | probable glycosyltransferase, |
| | | | | | | | Streptomyces nogalater |
| | | | AAC64928.1, 393aa | 3e−47 | 148/430 (34.42%) | 198/430 (46.05%) | glycosyltransferase, |
| | | | | | | | Streptomyces argillaceus |
| 21 | DEPN | 337 | AAK83183.1, 337aa | 1e−174 | 301/337 (89.32%) | 320/337 (94.96%) | putative NDP-glucose 4,6-dehydratase, |
| | | | | | | | Streptomyces viridochromogenes |
| | | | T35486, 330aa | 4e−95 | 175/311 (56.27%) | 216/311 (69.45%) | probable nucleotide-sugar dehydratase, |
| | | | | | | | Streptomyces coelicolor |
| | | | S58282, 445aa | 2e−82 | 160/307 (52.12%) | 201/307 (65.47%) | dTDP-glucose 4-6-dehydratase |
| | | | | | | | homolog, Arabidopsis thaliana |
| 22 | MTFD | 242 | AAK83184.1, 240aa | 1e−122 | 216/240 (90%) | 222/240 (92.5%) | putative methyltransferase, |
| | | | | | | | Streptomyces viridochromogenes |
| 23 | MTFE | 238 | AAK83186.1, 239aa | 1e−119 | 210/231 (90.91%) | 216/231 (93.51%) | putative methyltransferase, |
| | | | | | | | Streptomyces viridochromogenes |
| | | | BAB69329.1, 266aa | 3e−07 | 53/155 (34.19%) | 63/155 (40.65%) | putative methyltransferase, |
| | | | | | | | Streptomyces avermitilis |
| 24 | OXRV | 314 | AAK83187.1, 314aa | 1e−1 63 | 270/314 (85.99%) | 285/314 (90.76%) | putative oxygenase, |
| | | | | | | | Streptomyces viridochromogenes |
| 25 | MTFF | 278 | AAK83188.1, 277aa | 1e−122 | 211/276 (76.45%) | 223/276 (80.8%) | AviG3, Streptomyces viridochromogenes |
| | | | NP_294079.1, 173aa | 2e−05 | 24/43 (55.81%) | 30/43 (69.77%) | methyltransferase, putative, |
| | | | | | | | Deinococcus radiodurans |
| 26 | UEVA | 396 | AAK83189.1, 396aa | 0.0 | 379/395 (95.95%) | 386/395 (97.72%) | AviX12, Streptomyces viridochromogenes |
| 27 | ABCD | 323 | AAG32068.1, 323aa | 1e−147 | 268/323 (82.97%) | 278/323 (86.07%) | putative ATP binding protein, |
| | | | | | | | Streptomyces viridochromogenes |
| | | | CAC08315.1, 336aa | 7e−95 | 184/309 (59.55%) | 216/309 (69.9%) | putative ABC transport system ATP-binding |
| | | | | | | | protein, Streptomyces coelicolor |
| | | | T36344, 315aa | 4e−85 | 172/311 (55.31%) | 207/311 (66.56%) | probable ABC-type transport system |
| | | | | | | | ATP-binding protein, Streptomyces coelicolor |
| 28 | MEMD | 264 | AAG32069.1, 265aa | 1e−122 | 216/264 (81.82%) | 219/264 (82.95%) | putative transmembrane protein, |
| | | | | | | | Streptomyces viridochromogenes |
| | | | CAC08316.1, 280aa | 1e−52 | 108/263 (41.06%) | 153/263 (58.17%) | putative ABC transport system integral |
| | | | | | | | membrane protein, |
| | | | | | | | Streptomyces coelicolor |
| | | | T36343, 260aa | 6e−46 | 95/261 (36.4%) | 141/261 (54.02%) | probable ABC-type transport system |
| | | | | | | | transmembrane protein, |
| | | | | | | | Streptomyces coelicolor |
| 29 | OXRU | 325 | AAK83190.1, 334aa | 1e−140 | 248/325 (76.31%) | 260/325 (80%) | putative pyruvate dehydrogenase, Streptomyces |
| | | | | | | | viridochromogenes |
| | | | NP_342958.1, 332aa | 3e−56 | 126/328 (38.41%) | 175/328 (53.35%) | Pyruvate dehydrogenase-alpha subunit, |
| | | | | | | | Sulfolobus solfataricus |
| | | | I40790, 326aa | 2e−53 | 121/320 (37.81%) | 159/320 (49.69%) | acetoin dehydrogenase-alpha chain, |
| | | | | | | | Clostridium magnum |
| 30 | OXRT | 320 | AAK83191.1, 320aa | 1e−163 | 293/320 (91.56%) | 296/320 (92.5%) | putative pyruvate dehydrogenase, |
| | | | | | | | Streptomyces viridochromogenes |
| | | | NP_342959.1, 324aa | 4e−58 | 134/325 (41.23%) | 190/325 (58.46%) | Pyruvate dehydrogenase-beta subunit, |
| | | | | | | | Sulfolobus solfataricus |
| | | | I40791, 333aa | 4e−50 | 124/337 (36.8%) | 184/337 (54.6%) | acetoin dehydrogenase-beta chain, |
| | | | | | | | Clostridium magnum |
| 31 | GTFE | 335 | AAK83192.1, 338aa | 1e−169 | 285/335 (85.07%) | 299/335 (89.25%) | putative glycosyltransferase, |
| | | | | | | | Streptomyces viridochromogenes |
| | | | NP_349669.1, 299aa | 7e−19 | 67/230 (29.13%) | 103/230 (44.78%) | Predicted glycosyltransferase, |
| | | | | | | | Clostridium acetobutylicum |
| | | | NP_348928.1, 303aa | 7e−18 | 64/266 (24.06%) | 116/266 (43.61%) | Rhamnosyl transferase, |
| | | | | | | | Clostridium acetobutylicum |
| 32 | GTFH | 342 | AAK83193.1, 342aa | 1e−156 | 272/342 (79.53%) | 281/342 (82.16%) | putative glycosyltransferase, |
| | | | | | | | Streptomyces viridochromogenes |
| | | | NP_489347.1, 367aa | 4e−12 | 84/325 (25.85%) | 121/325 (37.23%) | probable glycosyl transferase, Nostoc sp. |
| | | | NP_102448.1, 353aa | 2e−11 | 93/352 (26.42%) | 130/352 (36.93%) | probable sugar transferase, Mesorhizobium loti |
| 33 | OXRW | 250 | AAK83181.1, 223aa | 1e−09 | 63/234 (26.92%) | 93/234 (39.74%) | putative oxygenase, Streptomyces |
| | | | | | | | viridochromogenes |
| 34 | PHOD | 241 | NP_417844.1, 252aa | 8e−06 | 43/134 (32.09%) | 68/134 (50.75%) | phosphoglycolate phosphatase, |
| | | | | | | | Escherichia coli K12 |
| 35 | DEPI | 314 | AAD45554.1, 312aa | 7e−46 | 115/284 (40.49%) | 143/284 (50.35%) | Spcl, Streptomyces netropsis |
| | | | AAK83169.1, 322aa | 4e−18 | 94/308 (30.52%) | 129/308 (41.88%) | putative UDP-glucose 4-epimerase, |
| | | | | | | | Streptomyces viridochromogenes |
| | | | NP_338283.1, 322aa | 4e−18 | 94/307 (30.62%) | 122/307 (39.74%) | NAD-dependent epimerase/dehydratase, |
| | | | | | | | Mycobacterium tuberculosis |
| 36 | HOXM | 485 | T44858, 491aa | 3e−65 | 154/428 (35.98%) | 233/428 (54.44%) | probable hydroxylase, Amycolatopsis orientalis |
| | | | T30590, 491aa | 1e−64 | 157/429 (36.6%) | 233/429 (54.31%) | alkylhalidase homolog, Amycolatopsis orientalis |
| | | | AAK81830.1, 497aa | 4e−63 | 150/416 (36.06%) | 225/416 (54.09%) | non-heme halogenase, Streptomyces lavendulae |
| 37 | HOXG | 283 | | | | | No homolog by blastp in GenBank nr |
| | | | | | | | protein database |
| 38 | MTFA | 348 | BAA32132.1, 305aa | 1e−57 | 127/306 (41.5%) | 150/306 (49.02%) | Orf4, Streptomyces griseus |
| | | | P42712, 376aa | 6e−57 | 129/333 (38.74%) | 170/333 (51.05%) | O-demethylpuromycin-O-methyltransferase, |
| | | | | | | | Streptomyces alboniger |
| | | | CAB76315.1, 342aa | 2e−24 | 79/286 (27.62%) | 121/286 (42.31%) | putative O-methyltransferase, |
| | | | | | | | Streptomyces coelicolor |
| 39 | DEPE | 348 | CAC20923.1, 343aa | 1e−124 | 213/326 (65.34%) | 258/326 (79.14%) | PimJ protein, Streptomyces natalensis |
| | | | AAK73500.1, 344aa | 1e−122 | 212/326 (65.03%) | 261/326 (80.06%) | AmphDIII, Streptomyces nodosus |
| | | | AAF71765.1, 344aa | 1e−120 | 211/341 (61.88%) | 263/341 (77.13%) | NysDIII, Streptomyces noursei |
| 40 | DHYA | 466 | CAB96551.1, 486aa | 1e−130 | 247/479 (51.57%) | 306/479 (63.88%) | D-olivose, D-oliose and D-mycarose2,3- |
| | | | | | | | dehydratase, Streptomyces argillaceus |
| | | | AAF59932.1, 474aa | 1e−127 | 235/444 (52.93%) | 290/444 (65.32%) | dTDP-4-keto-6-deoxyglucose 2,3-dehydratase, |
| | | | | | | | Streptomyces antibioticus |
| | | | T46668, 488aa | 1e−121 | 238/476 (50%) | 295/476 (61.97%) | probable 2,3-dehydratase, Streptomyces |
| | | | | | | | nogalater emb |
| 41 | OXRA | 336 | CAB96550.1, 328aa | 5e−82 | 151/280 (53.93%) | 191/280 (68.21%) | D-oliose 4-ketoreductase, Streptomyces |
| | | | | | | | argillaceus |
| | | | AAF73453.1, 329aa | 2e−80 | 165/323 (51.08%) | 196/323 (60.68%) | putative 3-ketoreductase, Streptomyces galilaeus |
| | | | AAD13550.1, 321aa | 4e−78 | 152/285 (53.33%) | 186/285 (65.26%) | oxidoreductase homolog, Streptomyces |
| | | | | | | | cyanogenus |
| 42 | DEPG | 324 | AAD13561.1, 326aa | 4e−31 | 105/316 (33.23%) | 135/316 (42.72%) | NDP-hexose 4-keto reductase homolog, |
| | | | | | | | Streptomyces cyanogenus |
| | | | T46527, 304aa | 7e−31 | 104/312 (33.33%) | 139/312 (44.55%) | probable dTDP4-keto-6-deoxyhexose |
| | | | | | | | reductase, Streptomyces violaceoruber |
| | | | AAB63047.1, 307aa | 5e−29 | 95/310 (30.65%) | 132/310 (42.58%) | thymidine diphospho-4-keto-2,3,6- |
| | | | | | | | trideoxyhexulose reductase, |
| | | | | | | | Streptomyces peucetius |

[0174] TABLE III-B

| | | | LENGTH | | |
|---|---|---|---|---|---|
| AVIA | ORF | START (bp) . . . END (bp) | (aa) | ORIENTATION | INTEGRITY |
| Contig 1 | 1 | 1 . . . 858 | 285 | POSITIVE | COMPLETE |
| | 2 | 1847 . . . 816 | 343 | NEGATIVE | COMPLETE |
| | 3 | 2721 . . . 1969 | 250 | NEGATIVE | COMPLETE |
| | 4 | 2972 . . . 3934 | 320 | POSITIVE | COMPLETE |
| | 5 | 4870 . . . 3986 | 294 | NEGATIVE | COMPLETE |
| | 6 | 5044 . . . 6114 | 356 | POSITIVE | COMPLETE |
| | 7 | 6410 . . . 6111 | 99 | NEGATIVE | COMPLETE |
| | 8 | 7412 . . . 6936 | 158 | NEGATIVE | COMPLETE |
| | 9 | 7639 . . . 8049 | 136 | POSITIVE | COMPLETE |
| | 10 | 7992 . . . 8741 | 249 | POSITIVE | COMPLETE |
| | 11 | 8738 . . . 9961 | 407 | POSITIVE | COMPLETE |
| | 12 | 10020 . . . 11390 | 456 | POSITIVE | COMPLETE |
| | 13 | 11546 . . . 12580 | 344 | POSITIVE | COMPLETE |
| | 14 | 12577 . . . 16431 | 1284 | POSITIVE | COMPLETE |
| | 15 | 16623 . . . 17690 | 355 | POSITIVE | COMPLETE |
| | 16 | 17723 . . . 18763 | 346 | POSITIVE | COMPLETE |
| | 17 | 18842 . . . 19870 | 342 | POSITIVE | COMPLETE |
| | 18 | 19960 . . . 20676 | 222 | POSITIVE | COMPLETE |
| | 19 | 20723 . . . 21394 | 223 | POSITIVE | COMPLETE |
| | 20 | 21442 . . . 22734 | 430 | POSITIVE | COMPLETE |
| | 21 | 22731 . . . 23744 | 337 | POSITIVE | COMPLETE |
| | 22 | 23741 . . . 24469 | 242 | POSITIVE | COMPLETE |
| | 23 | 24512 . . . 25228 | 238 | POSITIVE | COMPLETE |
| | 24 | 25239 . . . 26183 | 314 | POSITIVE | COMPLETE |
| | 25 | 26177 . . . 27013 | 278 | POSITIVE | COMPLETE |
| | 26 | 27010 . . . 28200 | 396 | POSITIVE | COMPLETE |
| | 27 | 28197 . . . 29168 | 323 | POSITIVE | COMPLETE |
| | 28 | 29168 . . . 29962 | 264 | POSITIVE | COMPLETE |
| | 29 | 30003 . . . 30980 | 325 | POSITIVE | COMPLETE |
| | 30 | 30980 . . . 31942 | 320 | POSITIVE | COMPLETE |
| | 31 | 31981 . . . 32988 | 335 | POSITIVE | COMPLETE |
| | 32 | 32985 . . . 34013 | 342 | POSITIVE | COMPLETE |
| | 33 | 34813 . . . 34061 | 250 | NEGATIVE | COMPLETE |
| | 34 | 35012 . . . 35737 | 241 | POSITIVE | COMPLETE |
| | 35 | 35734 . . . 36678 | 314 | POSITIVE | COMPLETE |
| | 36 | 38312 . . . 36855 | 485 | NEGATIVE | COMPLETE |
| | 37 | 38516 . . . 39367 | 283 | POSITIVE | COMPLETE |
| | 38 | 39369 . . . 40415 | 348 | POSITIVE | COMPLETE |
| | 39 | 40636 . . . 41682 | 348 | POSITIVE | COMPLETE |
| | 40 | 41676 . . . 43076 | 466 | POSITIVE | COMPLETE |
| | 41 | 43081 . . . 44091 | 336 | POSITIVE | COMPLETE |
| | 42 | 44081 . . . 45055 | 324 | POSITIVE | COMPLETE |

[0175] AVIA was compared to the avilamycin A locus of Streptomyces viridochromogenes Tu57 (herein referred to as AVIL), GenBank nucleotide accession AF333038, Weitnauer et al. 2001 Chemistry and Biology Vol. 8, pp. 569-581. FIG. 5 illustrates that the presence and orientation of homologous ORFs in AVIA and AVIL. The scale at the top of the FIG. 1 is in kilobasepairs. Solid black arrows depict the relative positions of the individual ORFs in AVIA and AVIL with the arrowhead indicating the orientation of each ORF; the corresponding four letter family designation is indicated to the right of each ORF. The empty arrows between the two loci highlight segments that contain a number of ORFs whose relative order and orientation is identical between the two loci. The order and orientation of ORFs in AVIA is identical to that in AVIL with the exception of one ORF in the middle of the AVIL locus designated as a member of the OXRF family of oxidoreductases. The ORF designated OXRF in AVIL does not have a counterpart in the AVIA locus (as indicated by the ‘X’). The ORFs in AVIL whose four-letter protein family designation is underlined are not disclosed in the Streptomyces viridochromogenes Tu57 avilamycin A biosynthetic gene cluster in the GenBank nucleotide accession AF333038. Using the compositions and methods of the present invention, we have now identified additional ORFs at the 3′ end of the AVIL locus. The sequence of the ORFs in AVIL corresponding to proteins considered designated HOXG and UNKU appear to be disrupted by frameshifts. It is unclear whether these frameshifts reflect real perturbations of the ORFs (rendering them inactive) or if they are due to sequencing errors. We have detected portions of the AVIL UNKU ORF in the region in which three small ORFs (designated UNIQ) had earlier been reported. We believe the presence of multiple frameshifts in the region corresponding to the UNKU ORF of AVIL may have resulted in the three earlier UNIQ ORFs report based on the wrong strand.

### EXAMPLE 3

### Genes Indicative of Orthosomycin Biosynthetic Loci

[0176] Certain genes in orthosomycin loci are associated with structural features that are common to all classes of orthosomycin oligosacharides and indicative of orthosomycin biosynthetic loci. Table IV lists the protein families and their respective ORF numbers in four orthosomycin loci, namely EVER (described in Example 1); AVIA (described in Example 2); EVEA (described in Example 10); and AVIL (described in Weitnauer et al. 2001 Chemistry and Biology Vol. 8, pp. 569-581). Each row in Table IV relates to a single protein family and identifies ORFs considered to be members of that protein family in the respective loci. The protein family is identified by its four-letter designation (see Table I). Thus, if a member of a particular protein family is found in one or more of EVEA, EVER, AVIA and AVIL those members will be listed in the same row. The symbols ## and ### and lower-case family designations for locus AVIL specify those ORFs that are not disclosed in the Streptomyces viridochromogens Tu57 amilamycin A locus in GenBank nucleotide accession AF333038 but that are now identified using the compositions and methods of the present invention. EVER and EVEA are examples of everninomicin-type orthosomycins; while AVIA and AVIL loci are examples of avilamycin-type orthosomycins.

[0177] The protein families in these four orthosomycin biosynthetic loci can be categorized into 5 groups based on their distribution: i) seventeen (17) families that are common among orthosomycin loci but also found in non-orthosomycin loci and therefore are not considered specific to orthosomycin; ii) seventeen (17) families that are common to most orthosomycin loci and are considered diagnostic of orthosomycin loci, as described in more detail below; iii) six (6) families that are diagnostic of avilamycin-type orthosomycin loci, particularly when found together with members of the protein families of group (ii) as described in more detail in Example 5; iv) nine (9) families that are considered diagnostic of everninomicin-type orthosomycin loci, particularly when found together with members of the protein families of group (ii), as described in more detail in Example 4; and v) a group of 12 miscellaneous families (not including those designated as ‘UNIQ’ in the AVIL locus) that are not present in all four orthosomycin loci and/or not unique to orthosomycin loci. Using the compositions and methods of the invention, the region of the strand opposite AVIL ORFs 2, 3, and 4 as disclosed in Weitnauer et al. 2001 Chemistry and Biology Vol. 8, pp. 569-581 exhibits homology to the AVIA member of protein family UNKU. Accordingly, it is believed that AVIL ORFs 2, 3, and 4 as disclosed in Weitnauer et al. may be incorrect conceptual translations and are designated as UNIQ in Table IV.

TABLE IV

| EVEA | | EVER | | AVIA | | AVIL | |
|---|---|---|---|---|---|---|---|
| ORF # | FAMILY | ORF # | FAMILY | ORF # | FAMILY | ORF # | FAMILY |

i) ORFs not necessarily unique to, but common to orthosomycin loci

| | | | | | | | |
|---|---|---|---|---|---|---|---|
| 3 | DEPA | 29 | DEPA | 16 | DEPA | 18 | DEPA |
| 22 | DEPE | 39 | DEPE | 39 | DEPE | ### | depe |
| 25 | DEPG | 10 | DEPG | 42 | DEPG | ### | depg |
| 34 | DEPH | 41 | DEPH | 4 | DEPH | 6 | DEPH |
| 28 | DEPI | 34 | DEPI | 35 | DEPI | ### | depi |
| 4 | DEPJ | 30 | DEPJ | 17 | DEPJ | 19 | DEPJ |
| 23 | DHYA | 38 | DHYA | 40 | DHYA | ### | dhya |
| 7 | GTFA | 16 | GTFA | 20 | GTFA | 22 | GTFA |
| 20 | HOXM | 20 | HOXM | 36 | HOXM | ### | hoxm |
| 17 | KASA | 14 | KASA | 13 | KASA | 15 | KASA |
| 15 | MEMK | 2 | MEMK | 12 | MEMK | 14 | MEMK |
| 44 | MTFA | 11 | MTFA | 38 | MTFA | ### | mtfa |
| 13 | MTFV | 6 | MTFV | 11 | MTFV | 13 | MTFV |
| 2 | NUTA | 28 | NUTA | 15 | NUTA | 17 | NUTA |
| 24 | OXRA | 37 | OXRA | 41 | OXRA | ### | oxra |
| 16 | PKSO | 32 | PKSO | 14 | PKSO | 16 | PKSO |
| 26 | REBV | 36 | REBV | 8 | REBV | 10 | REBV |

ii) ORFS which are diagnostic of orthosomycin loci

| | | | | | | | |
|---|---|---|---|---|---|---|---|
| 33 | GTFE | 24 | GTFE | 31 | GTFE | 34 | GTFE |
| 27 | GTFG | 35 | GTFG | 5 | GTFG | 7 | GTFG |
| 31 | GTFH | 8 | GTFH | 32 | GTFH | 35 | GTFH |
| 43 | HOXG | 12 | HOXG | 37 | HOXG | ## | hoxg |
| 8 | MTFD | 15 | MTFD | 22 | MTFD | 24 | MTFD |
| 10 | MTFE | 19 | MTFE | 23 | MTFE | 26 | MTFE |
| 12 | MTFF | 5 | MTFF | 25 | MTFF | 28 | MTFF |
| 45 | MTLA | 40 | MTLA | 3 | MTLA | 5 | MTLA |
| 11 | OXRV | 18 | OXRV | 24 | OXRV | 27 | OXRV |
| 30 | OXRW | 26 | OXRW | 33 | OXRW | ## | oxrw |
| 6 | OXRW | 31 | OXRX | 19 | OXRW | 21 | OXRW |
| 5 | UNAJ | | | 18 | UNAJ | 20 | UNAJ |
| 29 | PHOD | 33 | PHOD | 34 | PHOD | ## | phod |
| 14 | UEVA | 17 | UEVA | 26 | UEVA | 29 | UEVA |
| 32 | UNKU | 25 | UNKU | 2 | UNKU | ## | unku |
| | | 13 | MTIA | 1 | MTIA | 1 | MTIA |
| | | 9 | UEVB | 9 | UEVB | 11 | UEVB |

iii) ORFs not necessarily unique to, but common to avilamycin-type loci

| | | | |
|---|---|---|---|
| 27 | ABCD | 30 | ABCD |
| 21 | DEPN | 23 | DEPN |
| 28 | MEMD | 31 | MEMD |
| 6 | UNAI | 8 | UNAI |
| 7 | REBU | 9 | REBU |
| 10 | UNBR | 12 | UNBR |

iv) ORFs not necessarily unique to, but common to everninomicin-type loci

| | | | |
|---|---|---|---|
| 37 | DATC | 43 | DATC |
| 40 | DEPF | 46 | DEPF |
| 39 | EPIM | 45 | EPIM |
| 35 | GTFA | 21 | GTFA |
| 38 | MTFV | 44 | MTFV |
| 36 | OXBN | 42 | OXBN |
| 19 | OXCO | 4 | OXCO |
| 18 | MTFG | 3 | MTFG |
| 41 | UNBB | 47 | UNBB |

v) Miscellaneous ORFs present in various orthosomycin loci

| | | | | | | | |
|---|---|---|---|---|---|---|---|
| | | 23 | OXRT | 30 | OXRT | 33 | OXRT |
| | | 22 | OXRU | 29 | OXRU | 32 | OXRU |
| 9 | OXRF | | | | | 25 | OXRF |
| 42 | OXRF | | | | | | |
| 21 | EFFA | | | | | | |
| 1 | HYDH | | | | | | |
| | | 27 | DEPD | | | | |
| | | 48 | ENGA | | | | |
| | | 50 | KINB | | | | |
| | | 1 | MTBA | | | | |
| | | 7 | MTFH | | | | |
| | | 49 | REGL | | | | |
| | | | | | | 2 | UNIQ |
| | | | | | | 3 | UNIQ |
| | | | | | | 4 | UNIQ |

[0178] Group (ii) of Table IV, represent seventeen (17) protein families considered diagnostic of orthosomycin loci, namely GTFE, GTFG, GTFH, HOXG, MTFD, MTFE, MTFF, MTLA, OXRV, OXRW, OXRW, UNAJ, PHOD, UEVA, UNKU, UEVB, and MTIA. The 17 protein families includes two families designated OXRW, although in EVER one of the OXRW proteins is fused with a member of the UNAJ protein family and is therefore designated OXRX. Hence, EVER contains a single freestanding member of OXRW and contains no freestanding member of UNAJ. The UEVB, and MTIA families are not present in the EVEA locus, but are nonetheless considered to be diagnostic of orthosomycin loci as they are found in the other three orthosomycin loci and no known homologues have been described elsewhere to date. The seventeen protein families that are considered diagnostic of orthosomycin loci are those families for which no homologues exist that are naturally involved in the biosynthesis of compounds other than orthosomycins and/or no homologues exist that are in a context other than an orthosomycin biosynthetic locus. However, an orthosomycin biosynthetic locus is not necessarily expected to include a member of each of the seventeen protein families considered diagnostic of orthosomycin loci.

[0179] The following members of the seventeen protein families considered diagnostic of orthosomycin biosynthetic loci are identified in EVEA, EVER, AVIA and AVIL: GTFE (AVIA ORF 31, SEQ ID NO: 51; AVIL accession no. AAK83192; EVER ORF 24, SEQ ID NO: 53; EVEA ORF 33, SEQ ID NO: 55); GTFG (AVIA ORF 5, SEQ ID NO: 57; AVIL accession no. AAK83170; EVER ORF 35, SEQ ID NO: 59; EVEA ORF 27, SEQ ID NO: 61); GTFH (AVIA ORF 32, SEQ ID NO: 63; AVIL accession no. AAK83193; EVER ORF 8, SEQ ID NO: 65; EVEA ORF 31, SEQ ID NO: 67); HOXG (AVIA ORF 37, SEQ ID NO: 69; EVER ORF 12, SEQ ID NO: 71; EVEA ORF 43; SEQ ID NO: 73); MTFD (AVIA ORF 22, SEQ ID NO: 99; AVIL accession no. AAK83184; EVER ORF 15, SEQ ID NO: 101; EVEA ORF 8, SEQ ID NO: 103), MTFE (AVIA ORF 23, SEQ ID NO: 105; AVIL accession no. AAK83186; EVER ORF 19, SEQ ID NO: 107; EVEA ORF 10, SEQ ID NO: 109), MTFF (AVIA ORF 25, SEQ ID NO: 111; AVIL accession no. AAK83188; EVER ORF 5, SEQ ID NO: 113; EVEA ORF 12, SEQ ID NO: 115); MTLA (AVIA ORF 3, SEQ ID NO: 127; AVIL accession no. AAG32067; EVER ORF 40, SEQ ID NO: 129; EVEA ORF 45, SEQ ID NO: 131); MTIA (AVIA ORF 1, SEQ ID NO: 123; AVIL accession no. AAG32066; EVER ORF 13, SEQ ID NO: 125); OXRV (AVIA ORF 24, SEQ ID NO: 153; AVIL accession no. AAK83187; EVER ORF 18, SEQ ID NO: 155; EVEA ORF 11, SEQ ID NO: 157); OXRW (AVIA ORF 33, SEQ ID NO: 159; EVER ORF 26, SEQ ID NO: 161; EVEA ORF 30, SEQ ID NO: 163); OXRW (AVIA ORF 19, SEQ ID NO: 167; EVEA ORF 6, SEQ ID NO: 173; AVIL accession no. AAK83181), in EVER the second member of the OXRW family is fused with a protein from the UNAJ family and the combined polypeptide is designated as OXRX (EVER ORF 31, SEQ ID NO: 169); PHOD (AVIA ORF 34, SEQ ID NO: 175; EVER ORF 33, SEQ ID NO: 177; EVEA ORF 29, SEQ ID NO: 179); UNAJ (AVIA ORF 18, SEQ ID NO: 165; EVEA ORF 5, SEQ ID NO: 171), in EVER the UNAJ protein is fused with the second member of the OXRW family and the combined polypeptide is designated as OXRX (EVER ORF 31, SEQ ID NO: 169); UEVA (AVIA ORF 26, SEQ ID NO: 193; AVIL accession no. AAK83189; EVER ORF 17, SEQ ID NO: 195; EVEA ORF 14, SEQ ID NO: 197); UEVB (AVIA ORF 9, SEQ ID NO: 199; AVIL accession no. AAK83174; EVER ORF 9, SEQ ID NO: 201; and UNKU (AVIA ORF 2, SEQ ID NO: 203; EVER ORF 25, SEQ ID NO: 205; EVEA ORF 32, SEQ ID NO: 207).

[0180] The homologues from the four orthosomycin loci belonging to each of the seventeen families diagnostic of orthosomycin loci were compared by BLAST. The percent identity and percent similarity of the amino acid sequences are reported in the sixteen tables identified as Tables V to XX. Values in Tables V to XX are expressed as % identity (%similarity) following a pairwise blast 2 sequences; n/a, comparison is not applicable since UNAJ and OXRW are non homologous ORFs; XXX, denotes that a family homolog is not present in the locus. AVIL ORFs with an asterisk are present in the publicly available nucleotide sequence of the avilamycin locus (as shown in FIG. 10) but were not submitted to the GenBank protein database; homology values listed for such ORFs were obtained with tblastn using the default settings and the corresponding AVIA homologues as queries. “Refer to figure” denotes those avilamycin ORFs which are segmented, presumably because of frameshifts in the publicly available sequence, see the corresponding TBLASTN alignments below.

TABLE V
Homology among the GTFE family members

[chemical structure]

[0181] TABLE VI
Homology among the GTFG family members

[chemical structure]

[0182] TABLE VII
Homology among the GTFH family members

[chemical structure]

[0183] TABLE VIII
Homology among the HOXG family members

[chemical structure]

[0184] TABLE IX
Homology among the MTFD family members

[chemical structure]

[0185] TABLE X
Homology among the MTFE family members

[chemical structure]

[0186] TABLE X1
Homology among the MTFF family members

[chemical structure]

[0187] TABLE XII
Homology among the MTIA family members

[chemical structure]

[0188] TABLE XIII
Homology among the MTLA family members

[chemical structure]

[0189] TABLE XIV
Homology among the OXRV family members

[chemical structure]

[0190] TABLE XV
Homology among the OXRW family members

| | AVIA | AVIL* | EVEA | EVER |
|---|---|---|---|---|
| AVIA | [chemical structure] | 88% (91%) | 68% (75%) | 66% (76%) |
| AVIL* | 88% (91%) | [chemical structure] | 69% (76%) | 66% (77%) |
| EVEA | 68% (75%) | 69% (76%) | [chemical structure] | 71% (80%) |
| EVER | 66% (76%) | 66% (77%) | 71% (80%) | [chemical structure] |

[0191] TABLE XVI
Homology among the PHOD family members

| | AVIA | AVIL* | EVEA | EVER |
|---|---|---|---|---|
| AVIA | [chemical structure] | 87% (90%) | 63% (71%) | 63% (71%) |
| AVIL* | 87% (90%) | [chemical structure] | 63% (70%) | 61% (69%) |
| EVEA | 63% (71%) | 63% (70%) | [chemical structure] | 64% (75%) |
| EVER | 63% (71%) | 61% (69%) | 64% (75%) | [chemical structure] |

[0192] TABLE XVII
Homology among the UEVA family members

| | AVIA | AVIL | EVEA | EVER |
|---|---|---|---|---|
| AVIA | [chemical structure] | 95% (96%) | 77% (83%) | 70% (79%) |
| AVIL | 95% (96%) | [chemical structure] | 78% (84%) | 71% (79%) |
| EVEA | 77% (83%) | 78% (84%) | [chemical structure] | 73% (82%) |
| EVER | 70% (79%) | 71% (79%) | 73% (82%) | [chemical structure] |

[0193] TABLE XVIII
Homology among the UEVB family members

| | AVIA | AVIL | EVEA | EVER |
|---|---|---|---|---|
| AVIA | [chemical structure] | 93% (98%) | XXX | 81% (94%) |
| AVIL | 93% (98%) | [chemical structure] | XXX | 79% (95%) |
| EVEA | XXX | XXX | [chemical structure] | XXX |
| EVER | 81% (94%) | 79% (95%) | XXX | [chemical structure] |

[0194] TABLE XIX
Homology among the UNKU family members

| | AVIA | AVIL* | EVEA | EVER |
|---|---|---|---|---|
| AVIA | [chemical structure] | 59% (63%) | 64% (75%) | 62% (73%) |
| AVIL* | refer to figure | [chemical structure] | refer to figure | refer to figure |
| EVEA | 64% (75%) | refer to figure | [chemical structure] | 64% (75%) |
| EVER | 62% (73%) | refer to figure | 64% (75%) | [chemical structure] |

[0195] TABLE XX
Homology among the OXRX and UNAJ + OXRW family members

| | AVIA | | AVIL | | EVEA | | EVER |
|---|---|---|---|---|---|---|---|
| | OXRW | UNAJ | OXRW | UNAJ | OXRW | UNAJ | OXRX |
| AVIA_OXRW | [chemical structure] | n/a | 92% (92%) | n/a | 66% (75%) | n/a | 72% (78%) |
| AVIA_UNAJ | n/a | [chemical structure] | n/a | 81% (87%) | n/a | 66% (75%) | 69% (78%) |
| AVIL_OXRW | 92% (92%) | n/a | [chemical structure] | n/a | 66% (75%) | n/a | 74% (81%) |
| AVIL_UNAJ | n/a | 81% (87%) | n/a | [chemical structure] | n/a | 58% (68%) | 62% (71%) |
| EVEA_OXRW | 66% (75%) | n/a | 66% (75%) | n/a | [chemical structure] | n/a | 73% (80%) |
| EVEA_UNAJ | n/a | 66% (75%) | n/a | 58% (68%) | n/a | [chemical structure] | 77% (83%) |
| EVER_OXRX | 72% (78%) | 69% (78%) | 74% (81%) | 62% (71%) | 73% (80%) | 77% (83%) | [chemical structure] |

[0196] Without intending to be limited to any particular mechanism of action or biosynthetic scheme, the protein families which are found in all orthosomycin biosynthetic loci can explain formation of structural elements that define orthosomycin compounds. FIG. 2 shows one scheme for the biosynthesis of dichloroisoeverninic acid from acetyl CoA. In the scheme of FIG. 2, the KASA enzyme (a putative ketoacyl synthase) is a priming enzyme which loads acetyl CoA onto the PKSO (a putative orsellinic acid synthase). MFTA (similar to aromatic O-methyl transferases) methylates orsellinic acid, and HOXM (similar to non-heme hydroxylase/halogenases) chlorinates isoeverninic acid. Member of other protein families present in all orthosomycin loci may also be involved in the biosynthesis of dichloroisoeverninic acid moiety (or moieties) of orthosomycins.

[0197] FIG. 7 shows two schemes (A and B) for orthoester formation by the two OXRW's and OXRV, all of which have sequence similarity to iron alpha-ketoglutaric acid dependent enzymes. Scheme A is distinguished from scheme B in that the former does not implicate the action of a glycosyltransferase enzyme prior to the oxidative C—O coupling reaction. Similar oxidative C—O coupling has been observed in other iron alpha-ketoglutaric acid dependent enzymes such as clavaminic acid synthase (Salowe SP, Marsh EN, Townsend, CA, Biochemistry 29(27): 6499-6508). Members of other protein families present in all orthosomycin loci may also be involved in the formation of the orthoester linkage(s) of orthosomycins.

### EXAMPLE 4

### Genes Specific to Everninomicin-Type Orthosomycin Biosynthetic Loci

[0198] Protein families DATC, DEPF, EPIM, GTFA, MTFG, MTFV, OXBN, OXCO, and UNBB (group (iv) of Table IV) are considered diagnostic of everninomicin-type orthosomycin biosynthetic loci and everninomicin-type orthosomycin producers, particularly when a member of at least one, preferably 2, more preferably 3, still more preferably 4, still more preferably 5 and most preferably 6 or more of the nine protein families is found together with a member of one, preferably 2, more preferably 3, still more preferably 4, still more preferably 6, and most preferably 8 or more members of the seventeen orthosomycin specific protein families listed in group (ii) of Table IV. DATC, DEPF, EPIM, GTFA, MTFV, OXBN, and OXCO are not unique to everninomicin-type orthosomycin loci as close relatives are associated with secondary metabolism unrelated to orthosomycin biosynthesis. MTFG and UNBB represent two families that are considered to be unique to everninomicin-type orthosomycin loci as no homologues exist that are naturally involved in the biosynthesis of compounds other than everninomicin-type orthosomycins and/or no homologues exist that are in a context other than an everninomicin-type orthosomycin biosynthetic locus. An everninomicin-type orthosomycin biosynthetic locus is not expected to necessarily contain a member of the nine protein families considered diagnostic of everninomicin-type orthosomycin loci.

[0199] Homologues of the nine protein families diagnostic of everninomicin-type orthosomycin loci and present in EVER and EVEA were compared by Blast analysis with the default parameters. The percent identity and percent similarity of the amino acid sequences are reported in Table XXI.

TABLE XXI

| | % identity | % similarity |
|---|---|---|
| DATC | 78% | 84% |
| DEPF | 64% | 74% |
| EPIM | 74% | 84% |
| GTFA | 60% | 74% |
| MTFG | 70% | 75% |
| MTFV | 81% | 85% |
| OXBN | 80% | 86% |
| OXCO | 77% | 85% |
| UNBB | 71% | 82% |

[0200] Without intending to be limited to any particular mechanism or biosynthetic scheme, the protein families diagnostic of everninomicin-type orthosomycin biosynthetic loci can explain formation of structural elements that characterize everninomicin compounds. FIG. 8 shows one route for the formation of the nitrosugar residue of everninomicin. In FIG. 8 the amine oxidation reactions are catalyzed sequentially by OXBN, with sequence similarity to flavin-dependent monooxygenases.

### EXAMPLE 5

### Genes Specific to Avilamycin-Type Orthosomycin Biosynthetic Loci

[0201] Protein families ABCD, DEPN, MEMD, REBU, UNAI and UNBR (group (iii) of Table IV) are considered to be diagnostic of avilamycin-type orthosomycin, particularly when a member of one, preferably 2, more preferably 3, still more preferably 4 or more of the six protein families diagnostic of an avilamycin-type orthosomycin biosynthetic locus is found together with a member of one, preferably two, more preferably 4, still more preferably 6, still more preferably 8, and most preferably 10 or more members of the seventeen orthosomycin specific protein families listed in group (ii) of Table IV.

[0202] The six protein families considered diagnostic of avilamycin-type orthosomycin biosynthetic are ABCD (AVIA ORF 27, SEQ ID NO: 245; AVIL accession no. AAG32068); DEPN (AVIA ORF 21, SEQ ID NO: 247; AVIL accession no. AAK83183); MEMD (AVIA ORF 28, SEQ ID NO: 249; AVIL accession no. AAG32069); REBU (AVIA ORF 7, SEQ ID NO: 251; AVIL accession no. AAK83172); UNAI (AVIA ORF 6, SEQ ID NO: 253; AVIL accession no. AAK83171) and UNBR (AVIA ORF 10, SEQ ID NO: 255; AVIL accession no. AAK83175). ABCD, DEPN, MEMD, and UNAI are not unique to avilamycin-type orthosomycin loci as close relatives of their protein families exist in secondary metabolism unrelated to orthosomycin biosynthesis. REBU and UNBR members represent two families that are considered to be unique to avilamycin-type orthosomycin loci as no homologues exist that are naturally involved in the biosynthesis of compounds other than avilamycin-type orthosomycins and/or no homologues exist that are in a context other than an avilamycin-type orthosomycin biosynthetic locus. An avilamycin-type orthosomycin is not expected to necessarily include a member of each of the six protein families considered diagnostic of orthosomycin loci.

[0203] Homologues of the six families diagnostic of avilamycin-type orthosomycin loci and present in AVIA and AVIL were compared by Blast analysis. The percent identity and percent similarity of the amino acid sequences are reported in Table XXII.

TABLE XXII

| | % identity | % similarity |
|---|---|---|
| ABCD | 89% | 93% |
| DEPN | 89% | 94% |
| MEMD | 94% | 95% |
| REBU | 92% | 93% |
| UNAI | 86% | 92% |
| UNBR | 90% | 94% |

[0204] AVIA and AVIL both contain a two-component transport system that is not found in everninomicin-type loci. The ABCD and MEMD proteins in AVIA have been described as an ATP-binding transporter (AviABCI) and a transmembrane transporter (AviABCII), respectively, and are involved in conferring resistance of S. viridochromogenes to avilamycin A (Weitnauer et al., 2001, Antimicrob. Agents Chemother., Vol. 45, pp. 690-695). Based on the high sequence homology, corresponding ORF 27 (SEQ ID NO: 245) and ORF 28 (SEQ ID NO: 249) in the AVIA are believed to carry out analogous functions. These proteins are also similar to the DrrA and DrrB proteins of S. peucetius involved in conferring resistance of that organism to daunorubicin and doxorubicin. The ABCD protein, the AviABCI protein and the DrrA proteins are similar to proteins encoded by the mdr genes of mammalian tumor cells, which confer resistance on these cells to many structurally unrelated chemotherapeutic agents. ABCD and MEMD act jointly to confer resistance to avilamycin-type orthosomycin oligosaccharides by a mechanism analogous to the antiport mechanism established for mammalian tumor cells that contain amplified or overexpressed mdr genes (Guilfoile et al., 1991, Proc. Natl. Acad. Sci. USA, Vol. 88, pp. 8553-8557). AVIA and AVIL both contain a dehydratase/epimerase that is designated as ‘DEPN’ and which is distinct from the dehydratase/epimerase enzymes in the everninomicin-type orthosomycin loci. AVIA and AVIL both contain an ORF of unknown function designated as ‘UNAI’ for which no homologue is present in the everninomicin-type orthosomycin loci, but for which at least one homologue exists, hypothetical protein SCF55.28c of Streptomyces coelicolor A3(2)

### EXAMPLE 6

### Design of Diagnostic Nucleic Acid Sequences for Identifying Orthosomycin Genes by Hybridization or by PCR Amplification

[0205] Three of the seventeen families of proteins common to orthosomycin oligosaccharide biosynthetic loci were used to design oligonucleotides that may be used either as hybridization probes or as PCR primers for the purpose of identifying orthosomycin biosynthetic loci in other organisms. The three families of proteins that were used in this example include UEVA, UEVB, and HOXG. The nucleotide sequences of the UEVA, UEVB, and HOXG protein families from EVER, namely EVER ORFs 17, 9, and 12 (SEQ ID NOS: 195, 201 and 71 respectively), and from AVIA, namely AVIA ORFs 26, 9, and 37 (SEQ ID NOS: 193, 199 and 69 respectively) were aligned by pairwise comparison using ‘BLAST 2 Sequences’, a BLAST-based tool for aligning two protein or nucleotide sequences (Tatiana et al. 1999 FEMS Microbiol Lett. 174:247-250). Parameters were all default settings except that filtering (masking of segments of the query sequence that have low compositional complexity) was not applied.

[0206] The alignments of the EVER and AVIL sequences for their UEVA, UEVB and HOXG proteins are shown below in Tables XXIII, XXIV and XXV respectively. Table XXIII is a nucleic acid alignment of the UEVA protein family, comparing AVIA ORF 26 (SEQ ID NO: 193) and EVER ORF 17 (SEQ ID NO: 195). Table XXIV is a nucleic acid alignment of the UEVB protein family, comparing AVIA ORF 9 (SEQ ID NO: 199) and EVER ORF 9 (SEQ ID NO: 201). Table XXV is a nucleic acid alignment of the HOXG protein family, comparing AVIA ORF 37 (SEQ ID NO: 69) and EVER ORF 12 (SEQ ID NO: 71). Several well-conserved regions of the alignment that served as a basis for designing diagnostic oligonucleotides are highlighted (‘>’ is used to indicate oligonucleotides oriented in the ‘sense’ direction; ‘<’ is used to indicate oligonucleotides oriented in the ‘antisense’ direction; and ‘\hat{0}’ is used to indicate a control oligonucleotide that has the same sequence as one strand but with inverted polarity and hence is unable to hybridize to either strand, thus serving as a negative control).

TABLE XXIII

| | | UEVA-S1 | |
|---|---|---|---|
| | | >>>>>>>>>>>>>>>>>>>>>>>>>> | |
| AVIA_ORF26: | 30 | gtgcgtgctgccgtggatccacatgtgcgcctccatcgacggcgtctacggccggtgctg | 89 |
| | | \|\|\| \|\|\|\|\|\|\|\|\|\|\|\|\|\|\|\|\|\| \| \|\|\|\|\|\|\|\|\|\|\|\|\|\|\|\|\|\|\|\|\|\|\|\|\|\|\|\|\|\|\|\|\|\|\| | |
| EVER_ORF17: | 57 | gtgtgtgctgccgtggatccacctctgcgcctccatcgacggcgtctacggccggtgctg | 116 |
| | | > | |
| AVIA_ORF26: | 90 | cgtggacgactccatgtaccacaacgagctgtacgagtccgtggacgagccggtcttcaa | 149 |
| | | \|\|\| \|\|\|\|\|\|\|\| \|\|\|\|\|\|\|\|\|\| \|\|\|\|\|\|\|\|\|\|\| \|\|\| \|\|\|\|\|\|\| \|\|\| | |
| EVER_ORF17: | 117 | cgtcgacgactcgatgtaccacacggagctgtacgacgagcaggaggagccggcgttcgc | 176 |
| | | UEVA-S2 | |
| | | >>>>>>>>>>>>>>>>>>>>>>>>>> | |
| AVIA_ORF26: | 150 | gctcaacgccgacgccgtcggctgcgcgcccaactcccgctacgccaaggacaacccgga | 209 |
| EVER_ORF17: | 177 | gctgaacgacgacgcgatcggttgctccccgggctcgcggtacgccaaggacaacccgga | 236 |
| | | > | |
| AVIA_ORF26: | 210 | cgaggtacgcgggctgacggaggcgttcaacagccccaacatgcggcgcacccggctgaa | 269 |
| | | \| \|\| \|\| \| \|\|\|\|\|\| \|\|\|\|\|\|\|\|\|\|\|\|\|\|\|\|\|\| \|\|\| \|\|\|\|\|\|\|\|\| | |
| EVER_ORF17: | 237 | ccgcgtgatgggcatccgggaggccttcaacagccccaacatgaagcggacccggctggc | 296 |
| AVIA_ORF26: | 270 | gatgctggccggcgagcgggtgtccgcgtgcgactactgctaccaccgcgaggaccgggg | 329 |
| | | \|\|\|\|\|\| \| \|\|\|\|\|\|\|\| \|\|\| \|\|\|\|\|\| \| \|\|\|\|\|\|\|\|\| \|\|\| \|\|\|\|\|\|\| \|\| | |
| EVER_ORF17: | 297 | gatgctcggtggcgagcgcgtggaggcgtgcaagtactgctacttccgggaggaccacgg | 356 |
| AVIA_ORF26: | 330 | cgcgacctcgtaccggcagagcatcaacgagcggttcgccgacacggtggacttcgccga | 389 |
| | | \|\|\| \|\| \|\|\|\|\|\|\|\|\|\| \| \|\|\|\|\| \|\|\|\|\|\| \| \| \| \|\|\| \|\|\| \| | |
| EVER_ORF17: | 357 | cgcccagtcctaccggcagaacgtcaaccgccggttccaccaggagtacgacctcgatgc | 416 |
| AVIA_ORF26 | 390 | cctggccgaacggaccgcccccgacggctcgttcgacgagttcccgttcttcctggacat | 449 |
| | | \|\| \|\|\|\| \|\| \|\|\|\|\|\|\|\| \| \|\|\|\|\|\| \|\| \|\|\|\| \|\|\|\|\|\|\|\|\|\|\|\| \|\| \|\|\|\|\| | |
| EVER_ORF17: | 417 | gcccgccgcccgtaccgccgcggacggcacggtcgaggagttcccgttctttctcgacat | 476 |
| AVIA_ORF26: | 450 | ccggttcggcaacacctgcaacctgcggtgcgtgatgtgcgcctacccggtcagctccgg | 509 |
| | | \| \|\|\|\|\|\|\|\|\|\|\| \|\|\|\|\|\|\|\|\|\|\|\|\|\|\|\|\|\| \|\|\|\|\|\| \|\|\|\|\|\|\|\|\|\| \|\| \|\|\| | |
| EVER_ORF17: | 477 | caggttcggcaacctctgcaacctgcggtgcgtcatgtgcacctacccggtgagttcctc | 536 |
| | | UEVA-AS1 | |
| | | <<<<<<<<<<<<<<<<<<<<<<<<<<< | |
| AVIA_ORF26: | 510 | ctggggcgccaagaagcggccgtcgtggtcgtccgcggtgatcgacccgtaccgcgagga | 569 |
| | | \|\|\|\|\|\|\|\|\|\|\|\|\| \| \|\| \|\|\|\|\|\|\|\|\|\|\|\|\|\|\|\|\|\|\|\| \|\|\|\|\|\|\|\|\|\|\|\|\|\|\|\|\| \|\| | |
| EVER_ORF17: | 537 | ctggggcgccaagcaacgcccgtcgtggtcgtccgcggtcatcgacccgtaccgcgacga | 596 |
| AVIA_ORF26: | 570 | cgaggagctgtgggcgacgctccgcgagaacgcccacctcatccgccggctgtacttcgc | 629 |
| | | \|\|\| \|\|\| \|\|\|\|\|\|\|\|\|\|\|\|\| \|\| \|\|\|\|\| \|\| \|\|\|\|\| \|\|\|\|\|\| \|\|\|\|\|\|\|\|\|\|\|\| | |
| EVER_ORF17: | 597 | cgacgagttgtgggcgacgctgcgggagaatgcgcacctgatccgcaagctgtacttcgc | 656 |
| AVIA_ORF26: | 630 | cggcggtgaaccgttcatgcagccgggccacttcgcgatgctcgacctgctgatcgagac | 689 |
| | | \|\|\|\|\| \|\|\|\|\| \|\|\| \|\|\|\| \|\|\|\|\| \|\| \|\|\|\|\| \|\|\|\|\|\|\|\| \|\|\|\|\| \| \|\| \|\| | |
| EVER_ORF17: | 657 | gggcggcgaacccttcctgcaaccgggtcatttcgccatgctcgagctgctcgtggaaac | 716 |
| AVIA_ORF26: | 690 | cggcaacgcgggcaacgtcgacatcgtctacaactccaacctcacggtgctcccggagaa | 749 |
| | | \|\|\| \|\|\|\|\|\| \|\|\|\|\|\|\|\|\|\|\|\|\| \|\|\|\|\|\|\|\| \|\|\|\|\| \|\| \|\| \|\|\|\|\|\| \|\| | |
| EVER_ORF17: | 717 | cgggaacgcgcacaacgtcgacatccagtacaactcgaacctgaccgtctccccggacaa | 776 |
| | | UEVA-AS2 | |
| | | <<<<<<<<<<<<<< | |
| AVIA_ORF26: | 750 | ggtcttcgaccgcttcccgcacttcaagagcgtcgggatcggcgcctcctgcgacggcgt | 809 |
| | | \| \| \| \| \| \| \| \|\|\|\|\|\|\|\|\|\|\|\|\|\|\| \|\| \|\|\|\|\| \|\| \|\|\|\|\|\|\|\|\|\|\|\|\|\| | |
| EVER_ORF17: | 777 | cgcgataaagctcctacggcacttcaagagcgtgggcatcggggcttcctgcgacggcgt | 836 |
| | | UEVA-AS2 | |
| AVIA_ORF26: | 810 | cggcgaggtcttcgagcgcatccggcagcccgcgaaatgggacgtgttcgtcgccaacgt | 869 |
| | | \|\|\|\|\|\|\|\|\| \|\|\|\|\| \|\|\|\|\|\|\| \|\| \|\|\| \|\|\|\| \| \|\|\|\|\| \|\|\|\|\| \| | |
| EVER_ORF17: | 837 | cggcgaggtgttcgaatacatccgggccggcgggaagtgggcggacttcgtggccaatct | 896 |
| AVIA_ORF26: | 870 | ccgccgggccaagaccgaggtgaacctctggctccaggtcgcgccccagcggctcaacct | 929 |
| | | \|\|\|\| \| \| \| \|\|\|\| \| \|\| \|\|\|\|\|\|\|\|\|\|\|\|\| \| \|\| \|\|\|\|\|\|\| \|\|\|\|\|\| | |
| EVER_ORF17: | 897 | gcgcctgctccggtccgacttcgacgtctggctccaggtgtccccgcagcggcacaacct | 956 |
| AVIA_ORF26: | 930 | gtgggggctgcgggacctgctgcacttcggccgcgaggagggcctcgacgcggacctcgc | 989 |
| | | \|\|\|\|\| \|\|\|\|\| \|\| \|\|\|\| \| \|\|\|\|\| \|\| \|\|\|\|\| \|\| \|\| \| \|\|\|\|\|\| \|\| | |
| EVER_ORF17: | 957 | gtgggacctgcgcaacgtgctcgagttcgcgcgtaccgaggggctggaggtggacctggc | 1016 |
| AVIA_ORF26: | 990 | caacgtcgtgcagtggcccgacgactactccgtcgccaacctcccggacgaggagaagcg | 1049 |
| | | \|\|\|\|\|\| \|\|\|\|\|\|\|\|\|\|\| \| \|\| \|\|\| \|\|\|\|\|\|\| \|\|\| \|\|\| \|\|\|\|\|\|\|\|\|\|\|\| | |
| EVER_ORF17: | 1017 | caacgtggtgcagtggccgcaggatctctcggtcgccagcctgtcggccgaggagaaggc | 1076 |
| AVIA_ORF26: | 1050 | gcgggcgaccgtcgagctggccgacctggccgagtggtgcgacagcctggactgggccaa | 1109 |
| | | \|\|\| \|\| \|\|\| \|\|\|\|\|\| \| \|\|\|\|\|\| \|\| \|\|\|\|\|\|\| \| \|\| \| \|\|\|\|\| \|\|\| | |
| EVER_ORF17: | 1077 | gcgcgccacccaggagctgacggacctgatcgcctggtgcgccgagctcggctgggccaa | 1136 |
| AVIA_ORF26: | 1110 | gcccgc 1115 | |
| | | \|\|\|\|\|\| | |
| EVER_ORF17: | 1137 | gcccgc 1142 | |

Identities = 840/1066 (77%)

[0207] TABLE XXIV

| | | | |
|---|---|---|---|
| AVIA_ORF 9: | 2 | tgaaaatcgaggtgctccaaccgacctgcaacctggacacggtgcgggacggtcgcggcg | 61 |
| | | \|\|\|\| \|\|\|\|\|\|\|\| \|\| \|\| \|\|\|\| \|\|\|\|\|\|\|\|\|\|\|\|\|\|\| \|\| \|\|\|\|\|\|\|\| \|\| \|\|\|\| | |
| EVER_ORF 9: | 2 | tgaagatcgaggtcctgcagccgagctgcaacctggacaccgtccgggacggccggggcg | 61 |
| AVIA_ORF 9: | 62 | gaattttcacctgggttcccccggagcccatcctggaattcaatatgctgcacctgtacc | 121 |
| | | \| \|\| \|\|\|\|\|\|\|\|\|\|\| \|\| \|\| \|\|\|\|\| \|\|\|\|\|\|\|\| \|\|\|\|\| \| \| \| \|\| \|\|\| | |
| EVER_ORF 9: | 62 | gcatcttcacctgggtgccaccagagccgatcctggagttcaacctcatcaccatgcacc | 121 |
| | | UEVB-S1 | |
| | | >>>>>>>>>>>>>>>>>>>>>>> | |
| AVIA_ORF 9: | 122 | cgggaaaggtgcgcggtctgcactaccacccgcacttcgtcgaatacctgctcttcgtcg | 181 |
| | | \| \|\| \|\|\|\|\| \|\| \|\| \|\|\|\|\|\|\|\|\|\|\|\|\|\|\|\|\|\|\|\|\|\|\| \|\|\|\|\|\|\|\|\|\|\| \|\|\|\|\|\|\| | |
| EVER_ORF 9: | 122 | ccggcaaggtccgtgggctgcactaccacccgcacttcgtggaatacctgctgttcgtcg | 181 |
| AVIA_ORF 9: | 182 | agggctcgggcgtgctggtcaccaaggacgacgccgacgacccgaactgcgaggaagagt | 241 |
| | | \| \|\| \|\|\| \|\|\|\|\|\|\|\| \|\|\|\|\|\|\|\|\|\|\| \| \|\|\|\|\|\|\|\| \|\|\|\|\| \|\|\| \|\|\|\| | |
| EVER_ORF 9: | 182 | acggggagggggtgctggtgaccaaggacgatccggacgaccccgactgcccggaggagt | 241 |
| AVIA_ORF 9: | 242 | tcatccacgtctcgcgcggcatctgcaccaggacgcccgcggggatcatgcacgccgtcc | 301 |
| | | \|\|\|\|\|\|\|\|\|\|\| \| \|\| \|\| \| \|\| \|\| \| \|\|\|\|\|\| \| \|\| \| \|\|\|\|\|\|\|\| \|\|\| | |
| EVER_ORF 9: | 242 | tcatccacgtcgcccgggggacgtgtacgcgcacgccctccggagtgatgcacgcggtct | 301 |
| AVIA_ORF 9: | 302 | acgccatcacgccgctgacgttcatcgccatgctcaccaagccctgggacgagtgcgacc | 361 |
| | | \|\| \| \|\|\|\|\|\| \|\|\|\|\| \| \|\|\| \| \|\|\|\|\|\| \| \|\|\| \|\| \|\|\|\|\|\|\|\|\|\|\| \|\| \| | |
| EVER_ORF 9: | 302 | actcgatcacgtcgctgtccttcgtggccatgttgacccgaccgtgggacgagtgtgatc | 361 |
| AVIA_ORF 9: | 362 | cgccgctggtccaggtcgagccgctgccgcacaccct 398 | |
| | | \|\|\|\| \| \|\|\|\|\|\|\|\| \|\|\|\|\|\|\|\|\|\|\|\|\|\|\|\|\|\|\| | |
| EVER_ORF 9: | 362 | cgcccatcgtccaggtgcagccgctgccgcacaccct 398 | |
| | | \hat{ }\hat{ }\hat{ }\hat{ }\hat{ }\hat{ }\hat{ }\hat{ }\hat{ }\hat{ }\hat{ }\hat{ }\hat{ }\hat{ }\hat{ }\hat{ }\hat{ }\hat{ }\hat{ }\hat{ }\hat{ }\hat{ }\hat{ }\hat{ } | |
| | | UEVB_CTL1 | |

Identities = 314/397 (79%)

[0208] TABLE XXV

| | | | |
|---|---|---|---|
| AVIA_ORF37: | 16 | ctgaccgag--gagcaggtcgagggcttcgtctccgacggcttcgtccacctgccgggtg | 73 |
| | | \|\|\|\|\| \|\| \|\|\|\|\|\| \|\|\|\|\| \|\|\|\|\|\|\|\| \|\|\|\|\|\|\|\|\|\|\|\|\|\|\| \|\|\|\|\| \| | |
| EVER_ORF12: | 4 | ctgac--agccgagcagatcgagagcttcgtcgccgacggcttcgtccgggtgccgadcg | 61 |
| AVIA_ORF37: | 74 | cgttcccgggggagctcgccgaggaggcgcgcgcc--ctgctgtggcggcagctggacat | 131 |
| | | \| \|\|\|\|\| \| \| \|\|\|\|\|\|\|\| \|\|\| \|\| \|\|\| \|\|\|\|\| \|\|\| \|\|\| \|\| \|\|\| \| | |
| EVER_ORF12: | 62 | ctttccccgccgcgctcgccgccgagt-gc-cgcaatctgctctggaagcaactcgacgt | 119 |
| AVIA_ORF37: | 132 | gga-cccggacgac--c-cgggcacctggacgc-gggaggtggtccggctcggggtgcgc | 186 |
| | | \|\|\| \|\|\|\| \|\|\|\|\| \| \|\| \|\|\|\|\|\|\|\| \| \|\|\|\|\|\|\| \|\|\|\|\|\|\|\|\|\|\| \|\|\|\| | |
| EVER_ORF12: | 120 | ggatcccg-acgacagctcg---acctggac-cagggaggtcgtccggctcggtctgcgg | 174 |
| AVIA_ORF37: | 187 | gacgacgacgtgttcgtcc-gtgccgccaacaccccg-c--tgct-gcacgccgcctacg | 241 |
| | | \| \|\|\|\|\|\|\|\| \|\|\|\|\|\| \| \| \|\| \|\|\|\|\|\|\|\|\|\|\|\| \| \|\| \| \| \| \|\| \| \|\|\|\| | |
| EVER_ORF12: | 175 | ggcgacgacgcgttcgtgcagagc-gccaacaccccggcgttggtcg-aggc-g--tacg | 229 |
| AVIA_ORF37: | 242 | accagctcgccggggagggccgctggc-agccgctg-accca-ggtcggcacgttcccgg | 298 |
| | | \|\|\|\|\|\|\|\|\| \|\|\| \| \|\|\|\|\|\| \|\|\|\| \| \|\|\|\|\|\| \|\| \| \|\|\|\|\|\| \|\|\|\|\|\|\|\|\| | |
| EVER_ORF12: | 230 | accagctcgtcggtgcgggccggtggcga-ccgctggac--atggtcgggacgttcccga | 286 |
| | | HOXG-S1 | |
| | | >>>>>>>>>>>>>>>>>> | |
| AVIA_ORF37: | 299 | tgcggttccccgtg-acgaagcgg--ccggaggagaccgaggactacggctggcacatcg | 355 |
| | | \| \|\| \|\|\|\|\| \|\|\| \|\| \| \|\| \|\|\|\|\| \|\| \|\|\|\|\|\|\|\|\|\|\|\|\|\|\|\|\|\|\|\|\|\|\|\| | |
| EVER_ORF12: | 287 | tccgtttcccggtggacc--g-ggatccggaacaggccgaggactacggctggcacatcg | 343 |
| | | HOXG-S1 | |
| | | >>>>>>>>> | |
| AVIA_ORF37: | 356 | acgccagcttcctc-gcc--gagggcgccgacgcc--ga-c--cg--c--gactggtccg | 403 |
| | | \|\|\|\|\|\|\|\|\|\|\|\|\|\| \|\|\| \|\|\|\|\|\|\| \| \|\|\|\| \|\| \| \|\| \| \|\|\|\|\|\| \| | |
| EVER_ORF12: | 344 | acgccagcttcctcagccccgagggcgtggccgccatgagcagcggccaggactgggagg | 403 |
| AVIA_ORF37: | 404 | gcgagctcgacg-t-gatcccgccggactacgacaagatcttccggta-caacgtgtg-g | 459 |
| | | \|\|\|\|\|\|\|\| \|\| \| \| \| \|\|\|\|\|\|\|\|\|\|\|\|\|\|\| \|\|\|\|\|\|\|\| \| \| \|\|\|\| \|\| \| | |
| EVER_ORF12: | 404 | gcgagctcc-cgctcg-tgccgccggactacgaccggatcttcc-gcagcaacctg-gtt | 459 |
| AVIA_ORF37: | 460 | tcccgcggccgggcgctgctgctcctgctgctgttctccgacaccggcgag-gaggacgc | 518 |
| | | \|\| \|\| \|\|\|\|\|\|\|\| \|\|\|\|\|\| \| \|\|\|\|\| \|\| \| \|\|\|\|\|\|\|\|\|\|\|\|\|\|\|\| \| \|\|\|\|\| | |
| EVER_ORF12: | 460 | tcgcgtggccgggccctgctggtgctgctcctctactccgacaccggcgagcg-tgacgc | 518 |
| AVIA_ORF37: | 519 | gcccacgctgatccgcgtcggctcccacctggacgtaccgccgctgctggcaccgtacgg | 578 |
| | | \|\|\|\|\|\|\|\|\|\|\|\|\|\|\| \|\|\|\|\| \|\| \|\|\|\|\|\|\|\|\|\|\| \|\|\|\|\| \|\|\|\|\|\|\|\| \|\| \|\|\|\|\| | |
| EVER_ORF12: | 519 | gcccacgctgatccgggtcggttcgcacctggacgtgccgcccctgctggcgccctacgg | 578 |
| AVIA_ORF37: | 579 | cgccgagggcacctacctggaggcc-g--gggaggtgggacg-ggaccggccgct---ga | 631 |
| | | \|\|\|\|\|\|\|\|\| \|\|\|\|\|\|\|\| \|\|\| \| \| \|\| \|\|\|\|\| \|\| \|\|\|\|\|\| \|\| \|\| \|\| | |
| EVER_ORF12: | 579 | cgccgaggggacctacct---cgcctgccgcgacgtggg-cgcggaccgccccctcgcga | 634 |
| | | HOXG-AS1 | |
| | | <<<<<<<<<<<<<<<<<<<<<<<<<<< | |
| AVIA_ORF37: | 632 | -ggtccgcga-cgggcaaggccggg-gacgcctacctctgccaccccttcctggtgcaca | 688 |
| | | \|\| \|\| \| \|\|\|\|\| \|\| \|\|\|\| \|\|\|\|\|\|\|\|\|\|\|\|\|\|\|\|\| \|\| \|\|\|\|\|\|\|\|\|\|\|\|\| | |
| EVER_ORF12: | 635 | tgg-cc---accgggc--gggcgggcgacgcctacctctgccatccgttcctggtgcaca | 688 |
| AVIA_ORF37: | 689 | cgccggtcgccaacaccggcgtcc-gcccgcgcttcatggcccagccgaacct-gctgc- | 745 |
| | | \|\|\|\|\| \|\| \|\|\|\|\|\|\|\|\|\|\| \|\| \|\|\|\| \|\| \|\|\|\|\|\|\|\|\|\|\|\|\| \|\|\| \|\|\|\|\| | |
| EVER_ORF12: | 689 | cgccgatcaccaacaccggc-accagcccccggttcatggcccagc----cctcgctgca | 743 |
| AVIA_ORF37: | 746 | -ccgtggggc-agctcgaactcgaccggc-ccgacggccggtacacccccgtcgagcggg | 802 |
| | | \|\|\| \|\|\| \|\| \|\|\|\| \|\| \|\|\|\| \|\| \|\|\|\|\|\|\| \| \|\|\|\| \|\|\| \|\|\|\|\|\|\|\|\|\| | |
| EVER_ORF12: | 744 | accgaccggcgagttcgacctggacc-gcgccgacgggcagtacgtcccggtcgagcggg | 802 |
| AVIA_ORF37: | 803 | ccg-tgcgccggg 814 | |
| | | \|\| \| \|\|\|\|\| | |
| EVER_ORF12: | 803 | -cgat---ccggg 811 | |

Identities = 653/853 (76%),
Gaps = 99/853 (11%)

[0209] The oligonucleotide sequences listed below on Table XXVI were supplied by Invitrogen™. Where necessary, degenerate oligonucletides were designed in which “S” denotes a base in the oligonucleotide that consists of an approximately equimolar mixture of G and C, and in which “R” denotes a base in the oligonucleotide that consists of an approximately equimolar mixture of G and A. The oligonucleotides may be used as hybridization probes to identify orthosomycin genes as further described in Example 7. The oligonucleotides may also be used as PCR primers, as described in Example 8, to amplify portions of orthosomycin genes either from isolated DNA (from pure cultures, mixed cultures, or environmental samples) or directly from crude cell mass or environmental sample. As further members of each gene family disclosed in this application are identified, those skilled in the art will be able to improve and refine diagnostic oligonucleotides for identifying and isolating orthosomycin genes, for example by using appropriate tools capable of carrying out multiple sequence alignments, for example Clustal (Higgins.and Sharp (1988) Gene Vol. 73 pp.237-244).

TABLE XXVI

| | | |
|---|---|---|
| Oligo- | | |
| nucleotide | Sequence (5′->3′) | length (nt) |

| | | |
|---|---|---|
| UEVA-S1 | ATCGACGGCGTCTACGGCCGGTGCTGC | 27 |
| UEVA-S2 | TCSCGSTACGCCAAGGACAACCCGGAC | 27 |
| UEVA-AS1 | GTCGATSACCGCGGACGACCACGACGG | 27 |
| UEVA-AS2 | GAASACCTCGCCGACGCCGTCGCAGGA | 27 |
| UEVB-S1 | CTGCACTACCACCCGCACTTCGT | 23 |
| UEVB-CTL1* | TCCCACACGCCGTCGCCGASSTGG | 24 |
| HOXG-S1 | ACTACGGCTGGCACATCGACGCCAGCT | 27 |
| HOXG-AS1 | CAGGAASGGRTGGCAGAGGTAGGCGTC | 27 |

*This oligonucleotide serves as a negative control in the hybridization experiments.

### EXAMPLE 7

### Use of Diagnostic Nucleic Acid Sequences for Identifying Orthosomycin Genes by Hybridization:

[0210] The microorganism Micromonospora carbonacea var. africana NRRL 15099 was obtained from the Agriculture Research Service Culture Collection of the United States Department of Agriculture. This organism was propagated on N-Z amine agar medium (per liter of water: 10.0 g glucose, 20 g soluble starch, 5.0 g yeast extract, 5.0 g N-Z Amine Type A (Sigma C0626), 1.0 g reagent grade CaCO₃, 15.0 g agar) at 28 degrees Celsius for several days. For isolation of high molecular weight genomic DNA, cell mass from three freshly grown, near confluent 100 mm petri dishes was used. The cell mass was collected by gentle scraping with a plastic spatula. Residual agar medium was removed by repeated washes with STE buffer (75 mM NaCl; 20 mM Tris-HCl, pH 8.0; 25 mM EDTA). High molecular weight DNA was isolated by established protocols (Kieser et al., Practical Streptomyces Genetics, The John Innes Foundation, 2000) and its integrity was verified by field inversion gel electrophoresis (FIGE) using the preset program number 6 of the FIGE MAPPER™ power supply (BIORAD).

[0211] A Micromonospora carbonacea var. africana genomic DNA cosmid library was prepared using the SuperCos-1 cosmid vector (Stratagene™). The cosmid arms were prepared as specified by the manufacturer. The high molecular weight DNA was subjected to partial digestion at 37 degrees Celsius with approximately one unit of Sau3AI restriction enzyme (New England Biolabs) per 100 micrograms of DNA in the buffer supplied by the manufacturer. At various timepoints, aliquots of the digestion were transferred to new microfuge tubes and the enzyme was inactivated by adding a final concentration of 10 mM EDTA and 0.1% SDS. Aliquots judged by FIGE analysis to contain a significant fraction of DNA in the desired size range (30-50 kb) were pooled, extracted with phenol/chloroform (1:1 vol:vol), and pelletted by ethanol precipitation. The 5′ ends of Sau3AI DNA fragments were dephosphorylated using alkaline phosphatase (Roche) according to the manufacturer's specifications at 37 degrees Celcius for 30 min. The phosphatase was heat inactivated at 70 degrees Celcius for 10 min and the DNA was extracted with phenol/chloroform (1:1 vol:vol), pelletted by ethanol precipitation, and resuspended in sterile water. The dephosphorylated Sau3AI DNA fragments were then ligated overnight at room temperature to the SuperCos-1 cosmid arms in a reaction containing approximately four-fold molar excess SuperCos-1 cosmid arms. The ligation products were packaged using Gigapack® III XL packaging extracts (Stratagene™) according to the manufacturer's specifications. A library of 864 isolated cosmid clones was picked and inoculated into nine 96-well microtiter plates containing LB broth (per liter of water: 10.0 g NaCl; 10.0 g tryptone; 5.0 g yeast extract) which were grown overnight and then adjusted to contain a final concentration of 25% glycerol. These microtiter plates were stored at −80 degrees Celcius and served as glycerol stocks. Duplicate microtiter plates were arrayed onto nylon membranes as follows. Cultures grown on microtiter plates were concentrated by pelleting and resuspending in a small volume of LB broth. A 3×3 grid of 96-pins per grid was spotted onto nylon membranes. These membranes representing the complete cosmid library were then layered onto LB agar and incubated ovenight at 37 degrees Celcius to allow colonies to grow. The membranes were layered onto filter paper pre-soaked with 0.5 N NaOH/1.5 M NaCl for 10 min to denature the DNA and then neutralized by transferring onto filter paper pre-soaked with 0.5 M Tris (pH 8)/1.5 M NaCl for 10 min. Cell debris was gently scraped off with a plastic spatula and the DNA was crosslinked onto the membranes by UV irradiation using a GS GENE LINKER™ UV Chamber (BIORAD).

[0212] Orthosomycin-specific hybridization oligonucleotide probes were radiolabeled with P³² using T4 polynucleotide kinase (New England Biolabs) in 15 microliter reactions containing 5 picomoles of oligonucleotide and 6.6 picomoles of [γ-P³²]ATP in the kinase reaction buffer supplied by the manufacturer. After 1 hour at 37 degrees Celcius, the kinase reaction was terminated by the addition of EDTA to a final concentration of 5 mM. The specific activity of the radiolabeled oligonucleotide probes was estimated using a Model 3 Geiger counter (Ludlum Measurements Inc., Sweetwater, Tex.) with a built-in integrator feature. The radiolabeled oligonucleotide probes were heat-denatured by incubation at 85 degrees Celcius for 10 minutes and quick-cooled in an ice bath immediately prior to use.

[0213] Cosmid library membranes were prepared by incubation for at least 2 hours at 42 degrees Celcius in Prehyb Solution (6× SSC; 20 mM NaH₂PO₄; 5× Denhardt's; 0.4% SDS; 0.1 mg/ml sonicated, denatured salmon sperm DNA) using a hybridization oven with gentle rotation. The membranes were then placed in Hyb Solution (6× SSC; 20mM NaH₂PO₄; 0.4% SDS; 0.1 mg/ml sonicated, denatured salmon sperm DNA) containing 1×10⁶ cpm/ml of radiolabeled oligonucleotide probe and incubated overnight at 42 degrees Celcius using a hybridization oven with gentle rotation. The next day, the membranes were washed with Wash Buffer (6× SSC, 0.1% SDS) for 45 minutes each at 46, 48, and 50 degrees Celcius using a hybridization oven with gentle rotation. The membranes were then exposed to X-ray film to visualize and identify the positive cosmid clones. The results obtained with four representative orthosomycin-specific oligonucleotide probes are shown in Table XXVII. Cosmid clones that were positive in the hybridization experiment are indicated by a ‘+’. The ends of the inserts in these cosmids were sequenced using T7 and T3 universal primers and, as expected, were shown to contain sequences homologous to those in the EVER locus (data not shown). Since cosmid clone IHO1was detected by most of the orthosomycin-specific oligonucleotide probes, including one derived from the OXCO gene family from the EVER locus (data not shown), it was selected for further sequencing analysis. This cosmid clone was completely sequenced using a shotgun method. Cosmid clones FBO3 and DHO1 were found to overlap and extend the IHOl sequence towards the 5′ and 3′ direction, respectively, so they too were sequenced. Together, overlapping cosmid clones IH01, FB03, and DH01 (hereto referred to as 050CB, 050CA, and 050CG, respectively) constitute over 85 kilobasepairs that includes the everninomicin biosynthetic locus of Micromonospora carbonacea var. africana (EVEA). EVEA is further described in Example 10.

TABLE XXVII

| | oligonucleotide probe | | | |
|---|---|---|---|---|
| Cosmid clone | UEVA-S2 | UEVA-AS2 | HOXG-S1 | HOXG-AS1 |
| AF02 | | | + | + |
| CD01 | + | | | |
| DA01 | + | | | |
| DD06 | | | | + |
| DH01 | | | + | |
| FB03 | | | | + |
| FH08 | + | | | |
| FH09 | | + | | |
| GF08 | | + | | |
| HA08 | | + | | |
| HD01 | | + | | |
| HF10 | | | | + |
| HH12 | | | + | |
| IB04 | | + | | |
| ID08 | | | + | + |
| IF12 | | + | | |
| IH01 | + | + | | + |

[0214] To verify the specificity of the diagnostic probes according to the invention, 50 ng aliquots of cosmid DNA from three microorganisms known to contain orthosomycin biosynthetic loci were spotted onto nylon membranes and denatured, crosslinked and probed as described above. Cosmid DNA was isolated according to the alkaline lysis method (Sambrook et al. 1989 Molecular cloning: a laboratory manual, 2^{nd} edition. Cold Spring Harbour Laboratory, Cold Spring Harbour, N.Y.) from 15 mililiter cultures. Cosmids used in this experiment included 050CA, 050CB, and 050CG of the everninomicin locus from Micromonospora carbonacea var. africana (EVEA); 010CA, 010CB, and 010CG of the everninomicin locus from Micromonospora carbonacea var. aurantiaca (EVER); and 017CH, 017CP, and 017CP of the avilamycin-type locus from Streptomyces mobarensis (AVIA). In addition, a Micromonospora carbonacea var. aurantiaca genomic DNA cosmid clone, 050CC, which is unrelated to orothosomycin loci served as a negative control. The results obtained with eight orthosomycin-specific oligonucleotide probes are shown in Table XXVIII. Cosmid clones that were positive in the hybridization experiment are indicated by a ‘+’. Cosmid clones that were negative in the hybridization experiment are indicated by a ‘−’.

[0215] The results of the experiment summarized in Table XXVIII are consistent with the sequence information available for EVER, EVEA, and AVIA. The members of the UEVA, HOXG, and UEVB protein families in EVER are all contained within the 010CA cosmid; the same is not true for the other two loci, i.e. the members of the UEVA, HOXG and UEVB protein families in EVEA and AVIA are more distant to one another. All four UEVA probes consistently detected the same cosmid(s) in EVER, EVEA and AVIA, although the UEVA-S2 probe gave a weak signal for EVEA (indicated by the parentheses in Table XXVIII). The UEVB-S1 probe did not hybridize to EVEA cosmids as EVEA does not contain a UEVB homologue (see Example 10). None of the oligonucleotide probes hybridized to the negative control cosmid DNA, 050CC. The negative control oligonucleotide probe UEVB-CTL1 did not hybridize with any of the cosmid DNAs.

TABLE XXVIII

| | Cosmid | Oligonucleotide probe | | | | | | | |
|---|---|---|---|---|---|---|---|---|---|
| LOCUS | clone | UEVA-S1 | UEVA-S2 | UEVA-AS1 | UEVA-AS2 | HOXG-S1 | HOXG-AS1 | UEVB-S1 | UEVB-CTL1 |
| EVER | 010CA | + | + | + | + | + | + | + | − |
| | 010CB | − | − | − | − | − | − | − | − |
| | 010CG | − | − | − | − | − | − | − | − |
| EVEA | 050CA | − | − | − | − | − | − | − | − |
| | 050CB | + | (+) | + | + | − | − | − | − |
| | 050CG | − | − | − | − | + | + | − | − |
| AVIA | 017CH | + | + | + | + | − | − | + | − |
| | 017CP | + | + | + | + | + | + | | − |
| | 017CR | − | − | − | − | − | − | + | − |
| control | 050CC | − | − | − | − | − | − | − | − |

### EXAMPLE 8

### Use of Diagnostic Nucleic Acid Sequences for Identifying Orthosomycin Genes by PCR Amplification

[0216] The oligonucleotides described in Example 6 may be used as PCR primers to identify orthosomycin genes and biosynthetic loci and/or orthosomycin-producing organisms. Genomic DNA was prepared from Micromonospora carbonacea var. africana and Micromonospora carbonacea var. aurantiaca as described in Example 7. 010CA cosmid DNA was prepared by the alkaline lysis method (Sambrook et al. 1989 Molecular cloning: a laboratory manual, 2^{nd} edition. Cold Spring Harbour Laboratory, Cold Spring Harbour, NY). Aliquots of the genomic DNA and the cosmid DNA were used as template DNA in PCR reactions with the following four PCR primer pairs: 1) UEVA-S2 and UEVA-AS1; 2) UEVA-S1 and UEVA-AS1; 3) UEVA-S2 and UEVA-AS2; and 4) UEVA-S1 and UEVA-AS2.

[0217] Each PCR amplification was carried out in 50 microliter reactions containing 50-100 nanograms of template DNA; 37.5 picomoles of each primer; a final concentration of 0.2 mM each of dATP, dGTP, dCTP, and dTTP; a final concentration of 10% dimethyl sulfoxide, and 2 units of Pfu DNA polymerase (Stratagene™) in the reaction buffer supplied with the enzyme by the manufacturer. The PCR conditions included an initial two minute denaturation step at 96 degrees Celcius followed by thirty amplification cycles in which denaturation was performed at 96 degrees Celcius for 30 seconds, annealing was performed at 45 degrees Celcius for 30 seconds, and extension was performed at 72 degrees Celcius for 2.5 minutes.

[0218] The four primer pairs used were expected to amplify portions of the orthosomycin-specific UEVA gene and are listed in the order of increasing expected size for the amplified product. The relative position of these oligonucleotides is depicted on the UEVA aligned nucleotide sequences as shown below and in FIG. 9.

[0219] FIG. 9 is a picture of a 1% agarose gel stained with ethidium bromide in which 5 microliter aliquots of the PCR reactions were resolved by electrophoresis. Primer pairs are indicated at the top of the Figure. The numbers indicate which template DNA was used in the PCR reaction, i.e. “1” represents Micromonospora carbonacea var. africana genomic DNA; “2” represents Micromonospora carbonacea var. aurantiaca genomic DNA; and “3” represents cosmid 010CA from the EVER locus. The leftmost lane contains the 1 Kb Plus DNA ladder (Invitrogen™) molecular weight standards, some of which are labeled to the left in basepairs (bp). The schematic drawing below the picture in FIG. 9 depicts the relative positions of the primer pairs and the expected sizes (in basepairs) of the PCR products based on the known nucleotide sequence of the UEVA gene from the EVER locus (described in Example 1).

[0220] Referring to FIG. 9, the PCR reactions in which genomic DNA was used as template produced a smear with all four primer pairs tested. In contrast, the-PCR reactions in which purified 010CA cosmid DNA was used as template gave rise to distinct bands that are consistent with the expected sizes. This result suggests that the PCR conditions used are suboptimal for amplification from genomic DNA but may be adequate for less complex, subcloned DNA fragments. The smears that arise with genomic DNA templates are likely due to mispriming (i.e., inaccurate annealing of the PCR primers followed by extension) caused by a combination of a suboptimal annealing temperature in the thermal cycle, a high G/C content and complexity of the genomic DNA, relatively low abundance of the target sequence, and the presence of some degenerate positions in the oligonucleotide PCR primers.

[0221] Based on the assumption that a certain proportion of the amplified products arise from accurate priming events (as can be seen in several lanes in FIG. 9), an aliquot of the products obtained with the UEVA-S1 and UEVA-AS2 primer pair was used as template DNA in a second PCR reaction using the UEVA-S2 and UEVA-AS1 primer pair so as to specifically amplify the UEVA sequences. In essence, this amounts to a two-step nested PCR in which the first round of amplification serves to enrich for UEVA sequences with a pair of “outer” UEVA-derived primers and the second round of amplification, carried out with primers that are contained within the region defined by the “outer” primers. Using this two-step nested PCR approach on both Micromonospora carbonacea var. africana genomic DNA and Micromonospora carbonacea var. aurantiaca genomic DNA, a distinct band was obtained whose size was similar to that obtained with cosmid 010CA using the UEVA-S2 and UEVA-AS1 primer pair (data not shown). The band was resolved on an agarose gel and purified by spinning through a glass wool plug, extraction with phenol/chloroform (1:1 vol:vol), and pelletting by ethanol precipitation. The purified DNA was then sequenced using the UEVA-S2 and UEVA-AS1 primers.

[0222] The sequencing of the M. carbonacea var. africana PCR product yielded 302 nucleotides of high quality sequence information which is in perfect agreement with the region coding for amino acids 69-168 of the UEVA protein in EVEA (described in Example 10):

| | |
|---|---|
| AACCCCGGCCGGGTGATGGGCCTGGCGGACGCCTTCAACAGCCCC | 45 |
| N P G R V M G L A D A F N S P | |
| AACATGCGCCGGACCCGGCTGGCGATGCTGGCCGGGGAGCGGGTC | 90 |
| N M R R T R L A M L A G E R V | |
| GACGCCTGCTCCTACTGCTACCACCGCGAGGACCACGGCGCGCTG | 135 |
| D A C S Y C Y H R E D H G A L | |
| TCGTACCGGCAGGAGATCAACCAGCGGTTCCGGGACATCGCCGAC | 180 |
| S Y R Q E I N Q R F R D I A D | |
| CCCGACCGGCTGGCCGCCCGCACCGCGCCCGACGGCACCGTCGAG | 225 |
| P D R L A A R T A P D G T V E | |
| GACTTCCCGTTCTTCCTCGACATCCGGTTCGGCAACACCTGCAAC | 270 |
| D F P F F L D I R F G N T C N | |
| CTGCGGTGCGTGATGTGCGCGTACCCGGTCAG 302 | |
| L R C V M C A Y P V | |

[0223] The sequencing of the M. carbonacea var. aurantiaca PCR product yielded 343 nucleotides of high quality sequence information which is in perfect agreement with the region coding for amino acids 72-185 of the UEVA protein in the EVER locus (described in Example 1):

| | |
|---|---|
| CGGTACGCCAAGGACAACCCGGACCGCGTGATGGGCATCCGGGAG | 45 |
| R Y A K D N P D R V M G I R E | |
| GCCTTCAACAGCCCCAACATGAAGCGGACCCGGCTGGCGATGCTC | 90 |
| A F N S P N M K R T R L A M L | |
| GGTGGCGAGCGCGTGGAGGCGTGCAAGTACTGCTACTTCCGGGAG | 135 |
| C G E R V E A C K Y C Y F R E | |
| GACCACGGCGCCCAGTCCTACCGGCAGAACGTCAACCGCCGGTTC | 180 |
| D H C A Q S Y R Q N V N R R E | |
| CACCAGGAGTACGACCTCGATGCGCTCGCCGCCCGTACCGCCGCG | 225 |
| H Q E Y D L D A L A A R T A A | |
| GACGGCACGGTCGAGGAGTTCCCGTTCTTTCTCGACATCAGGTTC | 270 |
| D C T V E E F P F F L D I R F | |
| GGCAACCTCTGCAACCTGCGGTGCGTCATGTGCACCTACCCGGTG | 315 |
| G N L C N L R C V M C T Y P V | |
| AGTTCCTCCTGGGGCGCCAAGCAACGCC 343 | |
| S S S W G A K Q R | |

### EXAMPLE 9

### In silico Identification of Orthosomycin Biosynthetic Genes

[0224] Sequence information from the polypeptides and polynucleotides taught in the invention allows for in silico identification of orthosomycin biosynthetic loci in any biological sample. The biological sample may be an environmental sample (i.e. soil), genetic material and purified genetic material (DNA, RNA, cDNA) from environmental samples or from cultivated microorganisms. Genomic DNA from cultured Micromonospora carbonacea var. africana NRRL 15009 was extracted and analyzed as described in Canadian patent application 2,352,451. Briefly, extracted genomic DNA was randomly fragmented, size-fractionated to generate small size DNA fragments and cloned into an appropriate plasmid vector to generate a Genomic Sampling Library (GSL). The GSL is a library of small size random genomic DNA fragments that covers the entire genome of Micromonospora carbonacea var. africana NRRL 15009.

[0225] The GSL library was analyzed by sequence determination of the cloned genomic DNA inserts. The universal primers KS and/or SK, referred to as forward (F) and reverse (R) primers respectively, were used to initiate polymerization of labeled DNA. Sequence analysis of the Genomic Sequence Tags (GSTs) generated was performed using a 3700 ABI capillary electrophoresis DNA sequencer (Applied Biosystems). Further analysis of the GSTs was performed by sequence homology comparison to various protein sequence databases. The DNA sequences of the obtained GSTs were translated into amino acid sequences and compared to the National Center for Biotechnology Information (NCBI) nonredundant protein database and the DECIPHER™ database (Ecopia BioSciences, St.-Laurent, QC, Canada) using previously described algorithms (Altschul et al. J. Mol. Biol., October 5; 215(3) 403-10). Sequence similarity with known proteins of defined function in the databases facilitates recognition of protein families of the invention from the polypeptides encoded by the translated GSTs.

[0226] Four hundred GSTs were analyzed from the Micromonospora carbonacea var. africana GSL library and compared to the above protein databases. Among the 400 analyzed GSTs, three GSTs (RAA12, RAC92, FAE38) were found to have substantial sequence similarity to proteins taught by the invention to be diagnostic of orthosomycin biosynthetic loci (HOXG, OXRW, MTFD, respectively). These three GSTs had a much greater degree of similarity to homologous proteins from orthosomycin-specifying loci than to related proteins from non-orthosomycin-encoding loci. The degree of homology between the translated GST products and their homologs in EVER, AVIA, and AVIL othosomycin loci is shown in Table XXIX. All three GSTs encode members of protein families that are unique to the biosynthesis of orthosomycin compounds. HOXG, OXRW, and MTFD are only found in orthosomycin-encoding loci and their detection through the genomic sampling of Micromonospora carbonacea var. africana clearly indicates the presence of an orthosomycin-specific locus within the genome of the microorganism. The GSTs used for the in silico determination of the orthosomycin locus were subsequently shown to belong to EVEA as confirmed by complete sequence determination of the EVEA locus (see example 10).

[0227] Further determination of the class of the predicted orthosomycin compound would have been possible if GSTs harboring members of the protein families diagnostic for everninomicins or avilamycins had been detected. The presence of the orthosomycin-specifying locus was confirmed by detection and complete sequence determination of the locus (see example 10

[0228] A similar approach was used to evaluate the potential of Streptomyces sp. (collection ATCC 39365) to encode orthosomycin compounds. Seven hundred GSTs were analyzed and compared to protein databases. Among these GSTs, two (FAF63, FAA47) were shown to have substantial sequence homology to HOXG and PKSO protein families that are found in orthosomycin loci (see Table XXIX). HOXG is an orthosomycin diagnostic protein family as it is only found in orthosomycin biosynthetic loci, whereas PKSO is a protein family found in orthosomycin loci, but may also be associated with secondary metabolism other than orthosomycin biosynthesis. Use of the compositions and methods of the invention in regard to Streptomyces sp. (collection ATCC 39365) demonstrates the predictive ability of the invention for discovery of orthosomycin loci in microorganisms or biomass for which no metabolite expression determination was previously performed.

[0229] Table XXIX presents comparison of translated GSTs from Micromonospora carbonacea var. africana and Streptomyces sp. with their homologs from orthosomycin loci. Blast analysis was performed using the Blastx algorithm (Altschul et al. J. Mol. Biol., October 5; 215(3) 403-10). In each comparison, the first line indicates the number of identical amino acids and the degree of identity whereas the second line indicates the number of similar amino acids and the degree of similarity between the two protein segments.

TABLE XXIX

| | | | |
|---|---|---|---|
| EVER | EVEA | AVIA | AVIL |

Micromonospora carbonacea var. africana

| | | | | |
|---|---|---|---|---|
| HOXG | 75/93 (80%) | 86/86 (100%) iden. | 78/94 (82%) | 78/93 (83%) |
| | iden. | | | |
| (RAA12) | 77/93 (82%) | NA | 85/94 (89%) | 86/93 (91%) |
| | sim. | | | |
| OXRW | 83/132 (62%) | 134/134 (100%) | 86/132 (65%) | 87/132 (65%) |
| (RAC92) | 102/132 (76%) | NA | 101/132 (76%) | 102/132 (76%) |
| MTFD | 56/87 (64%) | 105/105 (100%) | 50/91 (54%) | 48/91 (52%) |
| (FAE38) | 70/87 (80%) | NA | 63/91 (68%) | 62/91 (67%) |

Streptomyces sp.

| | | | | |
|---|---|---|---|---|
| HOXG | 47/99 (47%) | 47/99 (47%) | 52/109 (47%) | 49/109 (44%) |
| (FAF63) | 56/99 (56%) | 56/99 (56%) | 63/109 (57%) | 61/109 (55%) |
| PKSO | 81/146 (55%) | 76/146 (52%) | 83/146 (56%) | 82/146 (56%) |
| (FAA47) | 97/146 (65%) | 92/146 (62%) | 97/146 (65%) | 95/146 (64%) |

### EXAMPLE 10

### The Everninomicin Biosynthetic Locus in Micromonospora carbonacea var. africana

[0230] The microorganism Micromonospora carbonacea var. africana NRRL 15099 was obtained from the Agriculture Research Service Culture Collection of the United States Department of Agriculture, 1815 N. University Street, Peoria, Ill. 61604. The everninomicin compounds produced by strain NRRL 15099 are described in U.S. Pat. No. 4,597,968. The biosynthetic locus for everninomicin from strain NRRL 15099 (EVEA) was identified according to the method described in Canadian patent application CA 2,352,451. The sequences obtained from cosmids containing overlapping genomic inserts spanning EVEA were identified. Within the sequences of the cosmid inserts, numerous ORFs encoding polypeptides having homology to known proteins were identified. Contiguous nucleotide sequences and deduced amino acid sequences of EVEA are provided as follows: the amino acid sequence of ORF 1 (SEQ ID NO 271) is deduced from the nucleic acid sequence of SEQ ID NO 272 drawn from contig 1 (SEQ ID NO 278). The amino acid sequence of ORF 2 (SEQ ID NO 137) is deduced from the nucleic acid sequence of SEQ ID NO 138 drawn from contig 1 (SEQ ID NO 278). The amino acid sequence of ORF 3 (SEQ ID NO 5) is deduced from the nucleic acid sequence of SEQ ID NO 6 drawn from contig 1 (SEQ ID NO 278). The amino acid sequence of ORF 4 (SEQ ID NO 37) is deduced from the nucleic acid sequence of SEQ ID NO 38 drawn from contig 1 (SEQ ID NO 278). The amino acid sequence of ORF 5 (SEQ ID NO 171) is deduced from the nucleic acid sequence of SEQ ID NO 172 drawn from contig 1 (SEQ ID NO 278). The amino acid sequence of ORF 6 (SEQ ID NO 173) is deduced from the nucleic acid sequence of SEQ ID NO 174 drawn from contig 1 (SEQ ID NO 278). The amino acid sequence of ORF 7 (SEQ ID NO 49) is deduced from the nucleic acid sequence of SEQ ID NO 50 drawn from contig 1 (SEQ ID NO 278). The amino acid sequence of ORF 8 (SEQ ID NO 103) is deduced from the nucleic acid sequence of SEQ ID NO 104 drawn from contig 1 (SEQ ID NO 278). The amino acid sequence of ORF 9 (SEQ ID NO 269) is deduced from the nucleic acid sequence of SEQ ID NO 270 drawn from contig 1 (SEQ ID NO 278). The amino acid sequence of ORF 10 (SEQ ID NO 109) is deduced from the nucleic acid sequence of SEQ ID NO 110 drawn from contig 1 (SEQ ID NO 278). The amino acid sequence of ORF 11 (SEQ ID NO 157) is deduced from the nucleic acid sequence of SEQ ID NO 158 drawn from contig 1 (SEQ ID NO 278). The amino acid sequence of ORF 12 (SEQ ID NO 115) is deduced from the nucleic acid sequence of SEQ ID NO 116 drawn from contig 1 (SEQ ID NO 278). The amino acid sequence of ORF 13 (SEQ ID NO 121) is deduced from the nucleic acid sequence of SEQ ID NO 122 drawn from contig 1 (SEQ ID NO 278). The amino acid sequence of ORF 14 (SEQ ID NO 197) is deduced from the nucleic acid sequence of SEQ ID NO 198 drawn from contig 1 (SEQ ID NO 278). The amino acid sequence of ORF 15 (SEQ ID NO 91) is deduced from the nucleic acid sequence of SEQ ID NO 92 drawn from contig 1 (SEQ ID NO 278). The amino acid sequence of ORF 16 (SEQ ID NO 185) is deduced from the nucleic acid sequence of SEQ ID NO 186 drawn from contig 2 (SEQ ID NO 279). The amino acid sequence of ORF 17 (SEQ ID NO 85) is deduced from the nucleic acid sequence of SEQ ID NO 86 drawn from contig 2 (SEQ ID NO 279). The amino acid sequence of ORF 18 (SEQ ID NO 227) is deduced from the nucleic acid sequence of SEQ ID NO 228 drawn from contig 2 (SEQ ID NO 279). The amino acid sequence of ORF 19 (SEQ ID NO 239) is deduced from the nucleic acid sequence of SEQ ID NO 240 drawn from contig 2 (SEQ ID NO 279). The amino acid sequence of ORF 20 (SEQ ID NO 79) is deduced from the nucleic acid sequence of SEQ ID NO 80 drawn from contig 2 (SEQ ID NO 279). The amino acid sequence of ORF 21 (SEQ ID NO 275) is deduced from the nucleic acid sequence of SEQ ID NO 276 drawn from contig 2 (SEQ ID NO 279). The amino acid sequence of ORF 22 (SEQ ID NO 11) is deduced from the nucleic acid sequence of SEQ ID NO 12 drawn from contig 2 (SEQ ID NO 279). The amino acid sequence of ORF 23 (SEQ ID NO 43) is deduced from the nucleic acid sequence of SEQ ID NO 44 drawn from contig 2 (SEQ ID NO 279). The amino acid sequence of ORF 24 (SEQ ID NO 143) is deduced from the nucleic acid sequence of SEQ ID NO 144 drawn from contig 2 (SEQ ID NO 279). The amino acid sequence of ORF 25 (SEQ ID NO 17) is deduced from the nucleic acid sequence of SEQ ID NO 18 drawn from contig 2 (SEQ ID NO 279). The amino acid sequence of ORF 26 (SEQ ID NO 191) is deduced from the nucleic acid sequence of SEQ ID NO 192 drawn from contig 2 (SEQ ID NO 279). The amino acid sequence of ORF 27 (SEQ ID NO 61) is deduced from the nucleic acid sequence of SEQ ID NO 62 drawn from contig 2 (SEQ ID NO 279). The amino acid sequence of ORF 28 (SEQ ID NO 31) is deduced from the nucleic acid sequence of SEQ ID NO 32 drawn from contig 2 (SEQ ID NO 279). The amino acid sequence of ORF 29 (SEQ ID NO 179) is deduced from the nucleic acid sequence of SEQ ID NO 180 drawn from contig 2 (SEQ ID NO 279). The amino acid sequence of ORF 30 (SEQ ID NO 163) is deduced from the nucleic acid sequence of SEQ ID NO 164 drawn from contig 2 (SEQ ID NO 279). The amino acid sequence of ORF 31 (SEQ ID NO 67) is deduced from the nucleic acid sequence of SEQ ID NO 68 drawn from contig 2 (SEQ ID NO 279). The amino acid sequence of ORF 32 (SEQ ID NO 207) is deduced from the nucleic acid sequence of SEQ ID NO 208 drawn from contig 2 (SEQ ID NO 279). The amino acid sequence of ORF 33 (SEQ ID NO 55) is deduced from the nucleic acid sequence of SEQ ID NO 56 drawn from contig 2 (SEQ ID NO 279). The amino acid sequence of ORF 34 (SEQ ID NO 25) is deduced from the nucleic acid sequence of SEQ ID NO 26 drawn from contig 2 (SEQ ID NO 279). The amino acid sequence of ORF 35 (SEQ ID NO 223) is deduced from the nucleic acid sequence of SEQ ID NO 224 drawn from contig 2 (SEQ ID NO 279). The amino acid sequence of ORF 36 (SEQ ID NO 235) is deduced from the nucleic acid sequence of SEQ ID NO 236 drawn from contig 2 (SEQ ID NO 279). The amino acid sequence of ORF 37 (SEQ ID NO 211) is deduced from the nucleic acid sequence of SEQ ID NO 212 drawn from contig 2 (SEQ ID NO 279). The amino acid sequence of ORF 38 (SEQ ID NO 231) is deduced from the nucleic acid sequence of SEQ ID NO 232 drawn from contig 2 (SEQ ID NO 279). The amino acid sequence of ORF 39 (SEQ ID NO 219) is deduced from the nucleic acid sequence of SEQ ID NO 220 drawn from contig 2 (SEQ ID NO 279). The amino acid sequence of ORF 40 (SEQ ID NO 215) is deduced from the nucleic acid sequence of SEQ ID NO 216 drawn from contig 2 (SEQ ID NO 279). The amino acid sequence of ORF 41 (SEQ ID NO 243) is deduced from the nucleic acid sequence of SEQ ID NO 244 drawn from contig 2 (SEQ ID NO 279). The amino acid sequence of ORF 42 (SEQ ID NO 273) is deduced from the nucleic acid sequence of SEQ ID NO 274 drawn from contig 2 (SEQ ID NO 279). The amino acid sequence of ORF 43 (SEQ ID NO 73) is deduced from the nucleic acid sequence of SEQ ID NO 74 drawn from contig 2 (SEQ ID NO 279). The amino acid sequence of ORF 44 (SEQ ID NO 97) is deduced from the nucleic acid sequence of SEQ ID NO 98 drawn from contig 2 (SEQ ID NO 279). The amino acid sequence of ORF 45 (SEQ ID NO 131) is deduced from the nucleic acid sequence of SEQ ID NO 132 drawn from contig 2 (SEQ ID NO 279). Homology was determined using the BLASTP version 2.2.2 algorithm with the default parameters. Table XXX-A presents the results of the homology analysis. Table XXX-B presents the position, length and orientation of each EVEA ORF within SEQ ID NOS: 278 and 279.

TABLE XXX-A
EVEA blast table

| ORF | Family | #aa | GenBank homology | probability | | | |
|---|---|---|---|---|---|---|---|
| 1 | HYDH | 248 | CAB95990 1, 229aa | 1e−43 | 100/201 (49.75%) | 115/201 (57.21%) | putative hydrolase, Streptomyces |
| | | | | | | | coelicolor |
| 2 | NUTA | 355 | A26984, 355 aa | 1e−127 | 218/353 (61.76%) | 272/353 (77.05%) | strD protein, Streptomyces |
| | | | | | | | griseus |
| | | | P08075, 355aa | 1e−126 | 217/353 (61.47%) | 272/353 (77.05%) | dTDP-glucose synthase, Streptomyces |
| | | | | | | | griseus |
| | | | T30872, 355aa | 1e−123 | 213/354 (60.17%) | 273/354 (77.12%) | dNDP-glucose synthase, Streptomyces |
| | | | | | | | viridochromogenes |
| 3 | DEPA | 329 | T30873, 355aa | 1e−146 | 244/322 (75.78%) | 279/322 (86.65%) | dNDP-glucose dehydratase, Streptomyces |
| | | | | | | | viridochromogenes |
| | | | AAG18457.1, 332aa | 1e−127 | 223/326 (68.4%) | 257/326 (78.83%) | AprE, Streptomyces tenebrarius |
| | | | AAC68681.1, 337aa | 1e−120 | 214/328 (65.24%) | 245/328 (74.7%) | TDP-glucose-4,6-dehydratase, |
| | | | | | | | Streptomyces venezuelae |
| 4 | DEPJ | 342 | AAK83179.1, 342aa | 1e−160 | 277/342 (80.99%) | 302/342 (88.3%) | putative NDP-glucose 4-epimerase, |
| | | | | | | | Streptomyces viridochromogenes |
| | | | NP_228319.1, 309aa | 1e−43 | 113/305 (37.05%) | 164/305 (53.77%) | UDP-glucose 4-epimerase, putative, |
| | | | | | | | Thermotoga maritima |
| | | | NP_252757.1, 309aa | 1e−36 | 111/303 (36.63%) | 155/303 (51.16%) | probable epimerase, |
| | | | | | | | Pseudomonas aeruginosa |
| 5 | UNAJ | 245 | AAK83180.1, 199aa | 9e−59 | 116/198 (58.59%) | 137/198 (69.19%) | putative methyltransferase, |
| | | | | | | | Streptomyces viridochromogenes |
| 6 | OXRW | 224 | AAK83181.1, 223aa | 3e−80 | 146/218 (66.97%) | 167/218 (76.61%) | putative oxygenase, Streptomyces |
| | | | | | | | viridochromogenes |
| | | | AAF01812.1, 267aa | 5e−10 | 61/231 (26.41%) | 93/231 (40.26%) | SnoK, Streptomyces nogalater |
| | | | AAK83187.1, 314aa | 2e−08 | 54/212 (25.47%) | 86/212 (40.57%) | putative oxygenase, Streptomyces |
| | | | | | | | viridochromogenes |
| 7 | GTFA | 423 | AAK83182.1, 430aa | 1e−177 | 293/418 (70.1%) | 346/418 (82.78%) | putative glycosyltransferase, Streptomyces |
| | | | | | | | viridochromogenes |
| | | | T46681, 411aa | 1e−60 | 151/417 (36.21%) | 223/417 (53.48%) | probable glycosyltransferase snogZ, imported, |
| | | | | | | | Streptomyces nogalater |
| | | | AAD55583.1, 396aa | 9e−43 | 134/414 (32.37%) | 200/414 (48.31%) | glycosyltransferase, Streptomyces |
| | | | | | | | argillaceus |
| 8 | MTFD | 247 | AAK83184.1, 240aa | 4e−67 | 125/226 (55.31%) | 157/226 (69.47%) | putative methyltransferase, |
| | | | | | | | Streptomyces viridochromogenes |
| 9 | OXRF | 342 | AAK83185.1, 330aa | 2e−77 | 163/338 (48.22%) | 193/338 (57.1%) | putative oxidoreductase, |
| | | | | | | | Streptomyces viridochromogenes |
| | | | NP_437022.1, 331aa | 9e−32 | 94/302 (31.13%) | 135/302 (44.7%) | putative aldoketo reductase protein, |
| | | | | | | | Sinorhizobium meliloti |
| | | | NP_388834.1, 331aa | 4e−30 | 84/295 (28.47%) | 137/295 (46.44%) | similar to aldo/keto reductase, |
| | | | | | | | Bacillus subtilis |
| 10 | MTFE | 257 | AAK83186.1, 239aa | 2e−87 | 157/219 (71.69%) | 172/219 (78.54%) | putative methyltransferase, |
| | | | | | | | Streptomyces viridochromogenes |
| | | | NP_419820.1, 453aa | 3e−07 | 55/164 (33.54%) | 80/164 (48.78%) | hypothetical protein, |
| | | | | | | | Caulobacter crescentus |
| 11 | OXRV | 314 | AAK83187.1, 314aa | 1e−136 | 227/303 (74.92%) | 252/303 (83.17%) | putative oxygenase, Streptomyces, |
| | | | | | | | viridochromogenes |
| | | | AAK83181.1, 223aa | 9e−10 | 65/217 (29.95%) | 96/217 (44.24%) | putative oxygenase, Streptomyces |
| | | | | | | | viridochromogenes |
| 12 | MTFF | 282 | AAK83188.1, 277aa | 1e−103 | 179/241 (74.27%) | 199/241 (82.57%) | AviG3, Streptomyces |
| | | | | | | | viridochromogenes |
| | | | NP_489410.1, 209aa | 4e−07 | 40/136 (29.41%) | 63/136 (46.32%) | probable methyltransferase, |
| | | | | | | | Nostoc PCC 7120 |
| 13 | MTFV | 426 | AAK83176.1, 407aa | 1e−75 | 183/423 (43.26%) | 233/423 (55.08%) | methyltransferase, Streptomyces |
| | | | | | | | viridochromogenes |
| | | | AAD41823.1, 418aa | 2e−74 | 171/412 (41.5%) | 225/412 (54.61%) | NDP-hexose 3-C-methyltransferase, |
| | | | | | | | Streptomyces fradiae |
| 14 | UEVA | 397 | AAK83189.1, 396aa | 0.0 | 311/394 (78.93%) | 336/394 (85.28%) | AviX12, Streptomyces viridochromogenes |
| 15 | MEMK | 445 | CAC48373.1, 452aa | 3e−74 | 159/437 (36.38%) | 212/437 (48.51%) | putative antiporter, Amycolatopsis |
| | | | | | | | mediterranei |
| | | | NP_103653.1, 737aa | 2e−31 | 94/395 (23.8%) | 153/395 (38.73%) | Na/H antiporter, Mesorhizobium loti |
| | | | AAF26906.1, 713aa | 5e−22 | 90/376 (23.94%) | 135/376 (35.9%) | unknown, Polyangium cellulosum |
| 16 | PKSO | 1266 | T30871, 1293aa | 0.0 | 826/1267 (65.19%) | 951/1267 (75.06%) | orsellinic acid synthase, Streptomyces |
| | | | | | | | viridochromogenes |
| | | | AAK48943.1, 1778aa | 0.0 | 451/1171 (38.51%) | 632/1171 (53.97%) | 6-methylsalicylic acid synthase, |
| | | | | | | | Byssochlamys nivea |
| | | | BAA20102.1, 1800aa | 0.0 | 466/1175 (39.66%) | 652/1175 (55.49%) | 6-methylsalicylic acid synthase, |
| | | | | | | | Aspergillus terreus |
| 17 | KASA | 344 | AAK83178.1, 343aa | 1e−128 | 229/343 (66.76%) | 265/343 (77.26%) | AviN, Streptomyces viridochromogenes |
| | | | AAG29787.1, 355aa | 5e−72 | 144/347 (41.5%) | 203/347 (58.5%) | 3-ketoacyl-ACP-synthase, Streptomyces |
| | | | | | | | rishiriensis |
| | | | CAB71914.1, 346aa | 5e−69 | 134/343 (39.07%) | 199/343 (58.02%) | hypothetical protein, Streptomyces |
| | | | | | | | coelicolor |
| 18 | MTFG | 353 | AAL02176.1, 341aa | 2e−11 | 78/345 (22.61%) | 128/345 (37.1%) | rRNA methyltransferase, Enterococcus |
| | | | | | | | faecium |
| | | | NP_147325.1, 354aa | 2e−09 | 92/365 (25.21%) | 132/365 (36.16%) | hypothetical protein, Aeropyrum pernix |
| 19 | OXCO | 493 | AAK61713.1, 475aa | 1e−102 | 201/458 (43.89%) | 268/458 (58.52%) | oxidoreductase-like protein, |
| | | | | | | | Streptomyces aureofaciens |
| | | | AAL82808.1, 431aa | 1e−88 | 183/382 (47.91%) | 230/382 (60.21%) | JadZ, Streptomyces venezuelae |
| | | | CAB75422.1, 602aa | 2e−61 | 169/487 (34.7%) | 236/487 (48.46%) | polyphenol oxidase, Acremonium murorum |
| 20 | HOXM | 492 | AAK81830.1, 497aa | 3e−59 | 139/390 (35.64%) | 211/390 (54.1%) | non-heme halogenase, Streptomyces |
| | | | | | | | lavendulae |
| | | | T30590, 491aa | 5e−59 | 134/374 (35.83%) | 201/374 (53.74%) | alkylhalidase homolog, Amycolatopsis |
| | | | | | | | orientalis |
| | | | CAA76550.1, 491aa | 2e−58 | 133/374 (35.56%) | 201/374 (53.74%) | halogenase, Amycolatopsis mediterranei |
| 21 | EFFA | 530 | AAF00219.1, 525aa | 1e−122 | 237/498 (47.59%) | 310/498 (62.25%) | transporter, Streptomyces fradiae |
| | | | T36377, 531aa | 1e−111 | 209/488 (42.83%) | 290/488 (59.43%) | probable exporter, Streptomyces |
| | | | | | | | coelicolor |
| | | | AAD13557.1, 517aa | 1e−108 | 206/491 (41.96%) | 284/491 (57.84%) | LanJ, Streptomyces cyanogenus |
| 22 | DEPE | 346 | CAC20923.1, 343aa | 1e−122 | 210/326 (64.42%) | 256/326 (78.53%) | PimJ protein, Streptomyces natalensis |
| | | | AAK73500.1, 344aa | 1e−121 | 210/326 (64.42%) | 262/326 (80.37%) | AmphDIII, Streptomyces nodosus |
| | | | AAF71765.1, 344aa | 1e−120 | 212/326 (65.03%) | 255/326 (78.22%) | NysD III, Streptomyces noursei |
| 23 | DHYA | 484 | CAB96551.1, 486aa | 1e−119 | 220/444 (49.55%) | 276/444 (62.16%) | D-olivose, D-oliose and D-mycarose 2,3- |
| | | | | | | | dehydratase, Streptomyces argillaceus |
| | | | T51103, 474aa | 1e−118 | 230/446 (51.57%) | 278/446 (62.33%) | 2,3-dehydratase, validated, |
| | | | | | | | Streptomyces antibioticus |
| | | | AAG23276.1, 486aa | 1e−117 | 223/457 (48.8%) | 281/457 (61.49%) | probable NDP-hexose-2,3- |
| | | | | | | | dehydratase, Saccharopolysporainosa |
| 24 | OXRA | 344 | AAG23275.1, 332aa | 2e−71 | 141/298 (47.32%) | 174/298 (58.39%) | probable NDP-hexose-3- |
| | | | | | | | ketoreductase, Saccharopolysporainosa |
| | | | AAC01734.1, 330aa | 2e−68 | 140/318 (44.03%) | 180/318 (56.6%) | oxidoreductase, Amycolatopsis |
| | | | | | | | mediterranei |
| | | | AAD13550.1, 321aa | 1e−67 | 138/317 (43.53%) | 177/317 (55.84%) | oxidoreductase homolog, Streptomyces |
| | | | | | | | cyanogenus |
| 25 | DEPG | 317 | T46669, 328aa | 1e−40 | 114/295 (38.64%) | 150/295 (50.85%) | dTDP-4-keto-6-deoxyhexose reductase, |
| | | | | | | | Streptomyces nogalater |
| | | | AAD13561.1, 326aa | 2e−40 | 106/262 (40.46%) | 136/262 (51.91%) | NDP-hexose 4-keto reductase, |
| | | | | | | | Streptomyces cyanogenus |
| | | | AAF72549.1, 346aa | 2e−38 | 120/307 (39.09%) | 150/307 (48.86%) | NDP-hexose 4-ketoreductase, |
| | | | | | | | Streptomyces fradiae |
| 26 | REBV | 82 | AAK83173.1, 192aa | 2e−22 | 50/74 (67.57%) | 62/74 (83.78%) | putative response regulator, |
| | | | | | | | Streptomyces viridochromogenes |
| | | | AAF71781.1, 210aa | 5e−21 | 46/73 (63.01%) | 61/73 (83.56%) | ORF4, Streptomyces noursei |
| | | | BAB69313.1, 232aa | 2e−18 | 43/73 (58.9%) | 56/73 (76.71%) | transcription regulatory protein, |
| | | | | | | | Streptomyces avermitilis |
| 27 | GTFG | 304 | AAK83170.1, 240aa | 1e−61 | 119/193 (61.66%) | 135/193 (69.95%) | putative glycosyltransferase, |
| | | | | | | | Streptomyces viridochromogenes |
| | | | NP_487216.1, 313aa | 2e−04 | 25/69 (36.23%) | 32/69 (46.38%) | probable glycosyl transferase, |
| | | | | | | | Nostoc. PCC 7120 |
| 28 | DEPI | 423 | AAD45554.1, 312aa | 2e−52 | 117/283 (41.34%) | 151/283 (53.36%) | Spcl, Streptomyces netropsis |
| | | | NP_228319.1, 309aa | 2e−26 | 90/301 (29.9%) | 139/301 (46.18%) | UDP-glucose 4-epimerase, putative, |
| | | | | | | | Thermotoga maritima |
| | | | NP_218151.1, 314aa | 7e−22 | 94/310 (30.32%) | 126/310 (40.65%) | rmlB2, Mycobacterium |
| | | | | | | | tuberculosis H37Rv |
| 29 | PHOD | 250 | | | | | No homolog by blastp in GenBank nr |
| | | | | | | | protein database |
| 30 | OXRW | 253 | AAK83181.1, 223aa | 3e−13 | 72/236 (30.51%) | 103/236 (43.64%) | putative oxygenase, Streptomyces |
| | | | | | | | viridochromogenes |
| | | | AAF01812.1, 267aa | 8e−12 | 65/238 (27.31%) | 95/238 (39.92%) | SnoK, Streptomyces nogalater |
| | | | NP_107761.1, 273aa | 9e−09 | 48/161 (29.81%) | 74/161 (45.96%) | unknown protein, Mesorhizobium loti |
| 31 | GTFH | 340 | AAK83193.1, 342aa | 1e−119 | 209/342 (61.11%) | 244/342 (71.35%) | putative glycosyltransferase, Streptomyces |
| | | | | | | | viridochromogenes |
| | | | NP_489347.1, 367aa | 5e−08 | 78/349 (22.35%) | 135/349 (38.68%) | probable glycosyl transferase, |
| | | | | | | | Nostoc. PCC 7120 |
| | | | NP_102448.1, 353aa | 3e−07 | 81/336 (24.11%) | 129/336 (38.39%) | probable sugar transferase, |
| | | | | | | | Mesorhizobium loti |
| 32 | UNKU | 351 | | | | | No homolog by blastp in GenBank nr |
| | | | | | | | protein database |
| 33 | GTFE | 347 | AAK83192.1, 338aa | 1e−129 | 222/309 (71.84%) | 247/309 (79.94%) | putative glycosyltransferase, |
| | | | | | | | Streptomyces viridochromcgenes |
| | | | AAF04375.1, 296aa | 3e−18 | 78/260 (30%) | 105/260 (40.38%) | dTDP-rhamnosyl transferase, |
| | | | | | | | Mycobacterium smegmatis |
| | | | NP_301582.1, 308aa | 8e−18 | 79/272 (29.04%) | 113/272 (41.54%) | putative dTDP-rhamnosyl transferase, |
| | | | | | | | Mycobacterium leprae |
| 34 | DEPH | 308 | AAK83169.1, 322aa | 1e−88 | 166/305 (54.43%) | 198/305 (64.92%) | putative UDP-glucose 4-epimerase, |
| | | | | | | | Streptomyces viridochromogenes |
| | | | NP_218151.1, 314aa | 4e−61 | 141/305 (46.23%) | 173/305 (56.72%) | rmlB2, Mycobacterium |
| | | | | | | | tuberculosis H37Rv |
| | | | NP_228319.1, 309aa | 3e−61 | 128/293 (43.69%) | 173/293 (59.04%) | UDP-glucose 4-epimerase, Nputative, |
| | | | | | | | Thermotoga maritima |
| 35 | GTFA | 389 | AAD13553.1, 373aa | 5e−76 | 161/377 (42.71%) | 218/377 (57.82%) | glycosyl transferase homolog, |
| | | | | | | | Streptomyces cyanogenus |
| | | | AAF00209.1, 365aa | 1e−69 | 159/371 (42.86%) | 203/371 (54.72%) | glycosyl transferase, |
| | | | | | | | Streptomyces fradiae |
| | | | T46519, 382aa | 4e−59 | 140/382 (36.65%) | 201/382 (52.62%) | probable glycosyl transferase, |
| | | | | | | | imported, Streptomyces |
| | | | | | | | violaceoruber |
| 36 | OXBN | 412 | S39965, 406aa | 2e−97 | 191/386 (49.48%) | 242/386 (62.69%) | hypothetical protein, Streptomyces |
| | | | | | | | griseus |
| | | | AAB63045.1, 342aa | 4e−53 | 114/211 (54.03%) | 136/211 (64.45%) | putative flavoprotein, Streptomyces |
| | | | | | | | peucetius |
| | | | NP_388333.1, 381aa | 5e−25 | 103/371 (27.76%) | 159/371 (42.86%) | similar to butyryl-CoA dehydrogenase, |
| | | | | | | | Bacillus subtilis |
| 37 | DATC | 373 | BAB72037.1, 369aa | 1e−147 | 262/373 (70.24%) | 294/373 (78.82%) | AclZ, Streptomyces galilaeus |
| | | | B43306, 370aa | 1e−146 | 260/369 (70.46%) | 291/369 (78.86%) | probable hydro-lyase dnrJ, |
| | | | | | | | Streptomyces peucetius |
| | | | AAG13910.1, 374aa | 1e−145 | 258/374 (68.98%) | 295/374 (78.88%) | TDP-3-keto-6-deoxyhexose 3- |
| | | | | | | | aminotransaminase, Micromonospora |
| | | | | | | | megalomicea |
| 38 | MTFV | 416 | T30587, 408aa | 1e−160 | 273/402 (67.91%) | 318/402 (79.1%) | hypothetical protein, Amycolatopsis |
| | | | | | | | orientalis |
| | | | CAC48364.1, 408aa | 1e−158 | 271/402 (67.41%) | 320/402 (79.6%) | putative C-3 methyl transferase, Amycolatopsis |
| | | | | | | | mediterranei |
| | | | AAC38444.1, 403aa | 1e−154 | 264/398 (66.33%) | 309/398 (77.64%) | daunorubicin/doxorubicin biosynthesis |
| | | | | | | | enzyme, Streptomyces |
| | | | | | | | peucetius |
| 39 | EPIM | 200 | S39966, 212aa | 9e−55 | 106/196 (54.08%) | 128/196 (65.31%) | hypothetical protein, Streptomyces |
| | | | | | | | griseus |
| | | | AAB63046.1, 208aa | 2e−54 | 103/196 (52.55%) | 130/196 (66.33%) | putative epimerase, Streptomyces |
| | | | | | | | peucetius |
| | | | CAC48377.1, 205aa | 9e−52 | 98/195 (50.26%) | 128/195 (65.64%) | putative 3, 5 epimerase, Amycolatopsis |
| | | | | | | | mediterranei |
| 40 | DEPF | 359 | T17473, 325aa | 5e−49 | 111/276 (40.22%) | 142/276 (51.45%) | hypothetical protein, Amycolatopsis |
| | | | | | | | orientalis |
| | | | AAL14256.1, 325aa | 4e−45 | 106/240 (44.17%) | 123/240 (51.25%) | NDP-4-keto-6-deoxyhexose 4-ketoreductase, |
| | | | | | | | Streptomyces venezuelae |
| | | | AAG13913.1, 328aa | 5e−44 | 117/288 (40.63%) | 141/288 (48.96%) | TDP-4-keto-6-deoxyhexose 4-ketoreductase, |
| | | | | | | | Micromonospora megalomicea subsp. nigra |
| 41 | UNBB | 309 | | | | | No homolog by blastp in GenBank nr |
| | | | | | | | protein database |
| 42 | OXRF | 354 | CAC18692.2, 345aa | 3e−57 | 136/331 (41.09%) | 185/331 (55.89%) | putative aldoketoreductase, |
| | | | | | | | Streptomyces coelicolor |
| | | | NP_108492.1, 347aa | 2e−55 | 130/335 (38.81%) | 182/335 (54.33%) | oxido-reductase, and dehydratase |
| | | | | | | | mocA, Mesorhizobium loti |
| | | | NP_386945.1, 344aa | 3e−54 | 128/311 (41.16%) | 179/311 (57.56%) | Putative oxidoreductase, |
| | | | | | | | Sinorhizobium meliloti |
| 43 | HOXG | 284 | | | | | No homolog by blastp in GenBank nr |
| | | | | | | | protein database |
| 44 | MTFA | 362 | P42712, 376aa | 2e−58 | 133/350 (38%) | 181/350 (51.71%) | O-demethylpuromycin-O-methyltransferase, |
| | | | | | | | Streptomyces alboniger |
| | | | BAA32132.1, 305aa | 4e−48 | 113/303 (37.29%) | 145/303 (47.85%) | Orf4, Streptomyces griseus |
| | | | CAB76315.1, 342aa | 1e−31 | 99/334 (29.64%) | 148/334 (44.31%) | putative O-methyltransferase, |
| | | | | | | | Streptomyces coelicolor A3(2) |
| 45 | MTLA | 251 | AAG32067.1, 250aa | 1e−48 | 104/209 (49.76%) | 125/209 (59.81%) | rRNA methyl transferase, |
| | | | | | | | Streptomyces viridochromogenes |

[0231] TABLE XXX-B

| EVEA | ORF | START (bp) . . . END (bp) | LENGTH (aa) | ORIENTATION | INTEGRITY |
|---|---|---|---|---|---|
| Contig 1 | 1 | 1 . . . 747 | 248 | POSITIVE | COMPLETE |
| | 2 | 895 . . . 1962 | 355 | POSITIVE | COMPLETE |
| | 3 | 1962 . . . 2951 | 329 | POSITIVE | COMPLETE |
| | 4 | 3054 . . . 4082 | 342 | POSITIVE | COMPLETE |
| | 5 | 4137 . . . 4874 | 245 | POSITIVE | COMPLETE |
| | 6 | 4871 . . . 5545 | 224 | POSITIVE | COMPLETE |
| | 7 | 5598 . . . 6869 | 423 | POSITIVE | COMPLETE |
| | 8 | 6946 . . . 7689 | 247 | POSITIVE | COMPLETE |
| | 9 | 7735 . . . 8763 | 342 | POSITIVE | COMPLETE |
| | 10 | 8753 . . . 9526 | 257 | POSITIVE | COMPLETE |
| | 11 | 9523 . . . 10467 | 314 | POSITIVE | COMPLETE |
| | 12 | 10464 . . . 11312 | 282 | POSITIVE | COMPLETE |
| | 13 | 11314 . . . 12594 | 426 | POSITIVE | COMPLETE |
| | 14 | 12627 . . . 13820 | 397 | POSITIVE | COMPLETE |
| | 15 | 13867 . . . 15204 | 445 | POSITIVE | COMPLETE |
| Contig 2 | 16 | 3806 . . . 6 | 1266 | NEGATIVE | COMPLETE |
| | 17 | 4893 . . . 3859 | 344 | NEGATIVE | COMPLETE |
| | 18 | 5247 . . . 6305 | 353 | POSITIVE | COMPLETE |
| | 19 | 7794 . . . 6313 | 493 | NEGATIVE | COMPLETE |
| | 20 | 9421 . . . 7943 | 492 | NEGATIVE | COMPLETE |
| | 21 | 11171 . . . 9579 | 530 | NEGATIVE | COMPLETE |
| | 22 | 11575 . . . 12615 | 346 | POSITIVE | COMPLETE |
| | 23 | 12612 . . . 14066 | 484 | POSITIVE | COMPLETE |
| | 24 | 14071 . . . 15105 | 344 | POSITIVE | COMPLETE |
| | 25 | 15122 . . . 16075 | 317 | POSITIVE | COMPLETE |
| | 26 | 17064 . . . 17312 | 82 | POSITIVE | COMPLETE |
| | 27 | 17463 . . . 18377 | 304 | POSITIVE | COMPLETE |
| | 28 | 19301 . . . 18030 | 423 | NEGATIVE | COMPLETE |
| | 29 | 20061 . . . 19309 | 250 | NEGATIVE | COMPLETE |
| | 30 | 20262 . . . 21023 | 253 | POSITIVE | COMPLETE |
| | 31 | 22144 . . . 21122 | 340 | NEGATIVE | COMPLETE |
| | 32 | 23214 . . . 22159 | 351 | NEGATIVE | COMPLETE |
| | 33 | 24254 . . . 23211 | 347 | NEGATIVE | COMPLETE |
| | 34 | 25177 . . . 24251 | 308 | NEGATIVE | COMPLETE |
| | 35 | 26343 . . . 25174 | 389 | NEGATIVE | COMPLETE |
| | 36 | 26626 . . . 27864 | 412 | POSITIVE | COMPLETE |
| | 37 | 27875 . . . 28996 | 373 | POSITIVE | COMPLETE |
| | 38 | 29105 . . . 30355 | 416 | POSITIVE | COMPLETE |
| | 39 | 30363 . . . 30965 | 200 | POSITIVE | COMPLETE |
| | 40 | 32002 . . . 30923 | 359 | NEGATIVE | COMPLETE |
| | 41 | 32933 . . . 32004 | 309 | NEGATIVE | COMPLETE |
| | 42 | 33190 . . . 34254 | 354 | POSITIVE | COMPLETE |
| | 43 | 34375 . . . 35229 | 284 | POSITIVE | COMPLETE |
| | 44 | 35226 . . . 36314 | 362 | POSITIVE | COMPLETE |
| | 45 | 36361 . . . 37116 | 251 | POSITIVE | COMPLETE |

[0232] FIG. 10 is a schematic representation comparing the everninomicin biosynthetic locus from Micromonospora carbonacae var. aurantiaca (EVER) to the everninomicin biosynthetic locus from Micromonospora carbonacea var. africana (EVEA). The scale at the top of the figure is in kilobasepairs. Solid black arrows depict the relative positions of the individual ORFs in EVER and EVEA with the arrowhead indicating the orientation of each ORF; the corresponding four letter protein family designation is indicated to the right of each ORF. The empty arrows between the two loci highlight segments that contain a number of ORFs whose relative order and orientation is identical between the two loci. The orientation of the empty arrows indicates the relative order of the ORFs in each segment; the segments in the EVER locus have all arbitrarily been assigned the “left-to-right” orientation. A segment is defined as two or more adjacent ORFs whose relative order and orientation is identical in the loci being compared. The solid lines between the two loci link each segment from one locus to the corresponding segment in the other locus. The dashed lines between the two loci link individual pairs of homologous ORFs that do not form segments.

[0233] ORFs in each locus that do not have a counterpart in the other locus are indicated by an ‘X’. EVER contains ten (10) ORFs for which no counterpart is found in EVEA; these include ORFs designated as members of the protein families MTBA, MTFH, UEVB, MTIA, OXRU, OXRT, DEPD, ENGA, REGL, and KINB. EVEA contains four (4) ORFs for which no counterpart is found in EVER; these include ORFs designated as members of the protein families HYDH, OXRF, EFFA and OXRF. ORFs of the protein families MTBA, MTFH, UEVB, MTIA, OXRU, OXRT, DEPD, ENGA, REGL, KINB, HYDH, OXRF, EFFA and OXRF are not likely to be involved in the assembly of the core structure of the everninomicin-type orthosomycins. Rather, they are believed to be involved in various modifications of the core structure including methylation (MTBA and MTFH); oxidation/reduction (OXRU, OXRT, OXRF); or in resistance mechanisms (MTIA, EFFA).

[0234] A search of NCBI's Conserved Domain Database with Reverse Position Specific BLAST (Altschul et al., (1997) Nucleic Acids Res. 25:3389-3402) revealed that the UEVB family displays structural homology to the double stranded beta helix domain involved in carbohydrate binding and in protein-protein interactions in different contexts. Thus the UEVB family may represent small, carbohydrate-binding proteins that may specifically recognize certain substructures of orthosomycins. One interesting possibility is that the UEVB proteins recognize and bind to the sugar residue H so as to block further modifications. This hypothesis is based on the fact that the everninomicin locus from Micromonospora carbonacae var. africana does not contain a UEVB homologue and that this organism has been described to produce everninomicins with various substitutions on sugar residue H, including an ester linkage to an orsellinic acid moiety. Thus, based on this hypothesis, one would predict that disruption of the UEVB ORF in the AVIA, AVIL, or EVER loci or other orthosomycin loci that may contain such an ORF may result in the production of new orthosomycins with additional substitutions in sugar residue H.

[0235] The finding that the ORFs of the EVER and EVEA loci are shuffled to such an extent and the presence of ORFs that have no counterparts in each locus is unexpected as both loci produce related compounds and the respective organisms containing these loci are both classified as Micromonospora carbonacae.

[0236] It is to be understood that the embodiments described herein are for illustrative purposes only and that various modifications or changes in light thereof will be suggested to persons skilled in the art and are to be included within the spirit and purview of this application and scope of the appended claims. All publications, patents and patent applications cited herein are hereby incorporated by reference in their entirety for all purposes.

1. A method of identifying an orthosomycin biosynthetic gene or gene fragment comprising providing a sample containing genomic DNA, and detecting the presence of a nucleic acid sequence coding for a polypeptide from at least two of the groups consisting of:
a. SEQ ID NO: 51; Genbank accession no. AAK83192; SEQ ID NO: 53; SEQ ID NO: 55; and polypeptides having at least 65% homology to a polypeptide having the sequence of SEQ ID NOS: 51, 53, 55 or Genbank accession no AAK83192;
b. SEQ ID NO: 57; Genbank accession no. AAK83170; SEQ ID NO: 59; SEQ ID NO: 61; and polypeptides having at least 65% homology to a polypeptide having the sequence of SEQ ID NOS: 67, 59, 61 or Genbank accession no, AAKS3170;
c. SEQ ID NO: 63, Genbank accession no. AAK83193, SEQ ID NO: 65, SEQ ID NO: 67, and polypeptides having at least 65% homology to a polypeptide having the sequence of SEQ ID NOS: 63, 65, 67 or Genbank accession no. AAK83193;
d. SEQ ID NO: 69, SEQ ID NO: 71, SEQ ID NO: 73, and polypeptides having at least 66% homology to a polypeptide having the sequence of SEQ ID NOS: 69, 71 or 73;
e. SEQ ID NO: 99, Genbank accession no. AAK83184, SEQ ID NO: 101, SEQ ID NO: 103, and polypeptides having at least 65% homology to a polypeptide having the sequence of SEQ ID NOS: 99, 101, 103 or Genbank accession no. AAK83184;
f. SEQ ID NO: 105, Genbank accession no. AAK83186, SEQ ID NO: 107, SEQ ID NO: 109, and polypeptides having at least 65% homology to a polypeptide having the sequence of SEQ ID NOS: 105, 107, 109 or Genbank accession no. AAK83186;
g. SEQ ID NO: 111, Genbank accession no. AAK83188, SEQ ID NO: 113, SEQ ID NO: 115, and polypeptides having at least 65% homology to a polypeptide having the sequence of SEQ ID NOS: 111, 113, 115 or Genbank accession no. AAK83188;
h. SEQ ID NO: 127, Genbank accession no AAG32067, SEQ ID NO: 129, SEQ ID NO: 131 and polypeptides having at least 65% homology to a polypeptide having the sequence of SEQ ID NOS: 127, 129, 131 or Genbank accession no. AAG32067;
i. SEQ ID NO: 123, Genbank accession no. AAG32066, SEQ ID NO: 125 and polypeptides having at least 65% homology to a polypeptide having the sequence of SEQ ID NOS: 123, 125 or Genbank accession no. AAG32066;
j. SEQ ID NO: 153, Genbank accession no; AAK83187, SEQ ID NO: 155, SEQ ID NO: 157, and polypeptides having at least 65% homology to a polypeptide having the sequence of SEQ ID NOS: 153, 155, 157 or Genbank accession no. AA83187
k. SEQ ID NO: 159, SEQ ID NO: 161, SEQ ID NO: 163 and polypeptides having at least 65% homology to a polypeptide having the sequence of SEQ ID NOS: 159, 161 or 163;
l. SEQ ID NO: 167, SEQ ID NO: 173, Genbank accession no. AAK83181, SEQ ID NO: 169 and polypeptides having at least 65% homology to a polypeptide having the sequence of SEQ ID NOS: 167, 169, 173 or Genbank accession no. AAK83181;
m. SEQ ID NO: 175, SEQ ID NO: 177, SEQ ID NO: 179 and polypeptides having at least 65% homology to a polypeptide having the sequence of SEQ ID NOS: 175, 177 or 179;
n. SEQ ID NO: 165, SEQ ID NO: 171, SEQ ID NO: 169 and polypeptides having at least. 65% homology to a polypeptide having the sequence of SEQ ID NOS: 165, 169 or 171;
o. SEQ ID NO: 193, Genbank accession no. AAK83189, SEQ ID NO: 195, SEQ ID NO: 197 and polypeptides having at least 65% homology to a polypeptide having the sequence of SEQ ID NOS: 193, 195, 197 or Genbank accession no. AA3189;
p. SEQ ID NO: 199, Genbank accession no. AAK83174, SEQ ID NO: 201 and polypeptides having at least 65% homology to a polypeptide having the sequence of SEQ ID NOS: 199, 201 or Genbank accession no. AAK83174; and
q. SEQ ID NO: 203, SEQ ID NO: 205, SEQ ID NO: 207 and polypeptides having at least 65% homology to a polypeptide having the sequence of SEQ ID NOS: 203, 205 or 207.

2. The method according to claim 1 further comprising the step of detecting the presence of either:
a. a nucleic acid sequence coding for a polypeptide from at least one of the of the groups consisting of:
r. SEQ ID NO: 209, SEQ ID NO: 211 and polypeptides having at least 65% homology to a polypeptide of SEQ ID NO: 209 or SEQ ID NO. 211;
s. SEQ ID NO: 213, SEQ ID NO: 215 and polypeptides having at least 65% homology to a polypeptide of SEQ ID NO: 213 or SEQ ID NO: 215;
t. SEQ ID NO: 217, SEQ ID NO: 219 and polypeptides having at least 65% homology to a polypeptide of SEQ ID NO: 217 or SEQ ID NO: 219;
u. SEQ ID NO: 221, SEQ ID NO: 223 and polypeptides having at least 65% homology to a polypeptide of SEQ ID NO: 221 or SEQ ID NO: 223;
v. SEQ ID NO: 225, SEQ ID NO: 227 and polypeptides having at least 65% homology to a polypeptide of SEQ ID NO: 225 or SEQ ID NO: 227;
w. SEQ ID NO: 229, SEQ ID NO: 231 and polypeptides having at least 65% homology to a polypeptide of SEQ ID NO: 229 or SEQ ID NO: 231;
x. SEQ ID NO: 233, SEQ ID NO: 235 and polypeptides having at least 65% homology to a polypeptide of SEQ ID NO: 233 or SEQ ID NO: 235;
y. SEQ ID NO: 237, SEQ ID NO: 239 and polypeptides having at least 65% homology to a polypeptide of SEQ ID NO: 237 or SEQ ID NO: 239; and
z. SEQ ID NO: 241, SEQ ID NO. 243 and polypeptides having at least 65% homology to a polypeptide of SEQ ID NO: 241 or SEQ ID NO: 243;or;
b. detecting the presence of a nucleic acid sequence coding for a polypeptide from at least one of the groups consisting of:
aa. SEQ ID NO: 245, Genbank accession no. AAG32068 and polypeptides having at least 65% homology to a polypeptide of SEQ ID NO: 245 or Genbank accession no. AAG32066;
bb. SEQ ID NO: 247, Genbank accession no. AAK83183, and polypeptides having at least 65% homology to a polypeptide of SEQ ID NO; 247 or Genbank accession no. AAK83183;
cc. SEQ ID NO: 249, accession no. AAG32069, and polypeptides having at least 65% homology to a polypeptide of SEQ ID NO: 249 or Genbank accession no. AA32069;
dd. SEQ ID NO: 251, Genbank accession no. AAK83172, and polypeptides having at least 65% homology to a polypeptide of SEQ ID NO; 251 or Genbank accession no. AAK83172;
ee. SEQ ID NO: 253, Genbank accession no. AAK83171 and polypeptides having at least 65% homology to a polypeptide of SEQ ID NO: 253 or Genbank accession no. AAK83171; and
ff. SEQ ID NO: 255, Genbank accession no. AAK83175, and polypeptides having at least 66% homology to a polypeptide of SEQ ID NO: 255 or Genbank accession no. AA83175.

3. The method according to claim 1 further comprising the step of using the nucleic acid sequence detected to isolate an orthosomycin gene cluster from the sample containing genomic DNA.

4. The method of claim 1 further comprising identifying an organism containing the nucleic acid sequence detected from the genomic DNA in the sample.

5. A method according to claim 1 wherein the sample containing DNA Is biomass from environmental sources.

6. A method according to claim 5 wherein the biomass is a mixed microbial culture.

7. A method according to claim 1 wherein the sample containing genomic DNA is obtained from a mixed population of organisms.

8. A method according to claim 1 wherein the sample containing genomic DNA is a genomic library containing a plurality of clones, wherein the DNA for generating the clones is obtained from a mixed population of organisms.

9. A method according to claim 1 wherein the sample containing genomic DNA is obtained from a pure culture.

10. A method according to claim 1 wherein the sample containing genomic DNA is a genomic library containing a plurality of clones, wherein the DNA for generating the clones is obtained from a pure culture.

11. A method according to claim 1 wherein the presence of a nucleic acid sequence from at least 4 of the groups (a) to (q) is detected.

12. A method according to claim 1 wherein detecting the presence of a nucleic acid sequence coding for a polypeptide from groups (a) to (q) involves use of a hybridization probe or PCR primer derived from:
a. an isolated, purified, or enriched nucleic acid comprising one of the sequences of SEQ ID NOS: 52, 54, 56, 58, 60, 62, 64, 66, 68, 70, 72, 74, 100, 102, 104, 106, 108, 110, 112, 114, 116, 124, 126, 128, 130, 132, 154, 156, 158, 160, 162, 164, 166, 168, 170, 172, 174, 176, 178, 180, 194, 196, 198, 200, 202, 204, 206, 208, the sequences complementary thereto, or a fragment comprising at least 10, 15, 20, 25, 30, 35, 40, 50, 75, 100, 150, 200, 300, 400 or 500 consecutive bases of one of the sequences of SEQ ID NOS: 52, 54, 56, 58, 60, 62, 64, 66, 68, 70, 72, 74, 100, 102, 104, 106, 108, 110, 112, 114, 116, 124, 126, 128, 130, 132, 154, 156, 158, 160, 162, 164, 166, 168, 170, 172, 174, 176, 178, 180, 194, 196, 198, 200, 202, 204, 206, 208 or the sequences complementary thereto;
or
b. an isolated, purified or enriched nucleic acid which encodes one or the polypeptides of SEQ ID NOS: 51, 53, 55, 57, 59, 61, 63, 65, 67, 69, 71, 73, 99, 101, 103, 105, 107, 109, 111, 113, 115, 123, 125, 127, 129, 131, 153, 155, 157, 159, 161, 163, 165, 167, 169, 171, 173, 175, 177, 179, 193, 195, 197, 199, 201, 203, 205, 207 or fragments comprising at least 5, 10, 15, 20, 25, 30, 35, 40, 50, 75, 100 or 150 consecutive amino adds of one of the polypeptides of SEQ ID NOS: 51, 53, 55, 57, 59, 61, 63, 65, 67, 69, 71, 73, 99, 101, 103, 105, 107, 109, 111, 113, 115, 123, 125, 127, 129, 131, 153, 155, 157, 159, 161, 163, 165, 167, 169, 171, 173, 175, 177, 179, 193, 195, 197, 199, 201, 203, 205, 207.

13. A method of identifying an everninomicin-type orthosomycin biosynthetic gene duster comprising providing a sample containing DNA, and detecting the presence of a nucleic acid sequence coding for a polypeptide from at least one of the of the groups consisting of:
r. SEQ ID NO: 209, SEQ ID NO: 211 and polypeptides having at least 65% homology to a polypeptide of SEQ ID NO: 209 or SEQ ID NO: 211;
s. SEQ ID NO: 213, SEQ ID NO: 215 and polypeptides having at least 65% homology to a polypeptide of SEQ ID NO: 213 or SEQ ID NO: 215;
t. SEQ ID NO: 217, SEQ ID NO: 219 and polypeptides having at least 65% homology to a polypeptide of SEQ ID NO: 217 or SEQ ID NO: 219;
u. SEQ ID NO: 221, SEQ ID NO: 223 and polypeptides having at least 65% homology to a polypeptide of SEQ ID NO: 221 or SEQ ID NO: 223;
v. SEQ ID NO: 225, SEQ ID NO: 227 and polypeptides having at least 65% homology to a polypeptide of SEQ ID NO: 225 or SEQ ID NO: 227
w. SEQ ID NO: 229, SEQ ID NO: 231 and polypeptides having at least 65% homology to a polypeptide of SEQ ID NO: 229 or SEQ ID NO: 231;
x. SEQ ID NO: 233, SEQ ID NO: 235 and polypeptides having at least 65% homology to a polypeptide of SEQ ID NO: 233 or SEQ ID NO: 235;
y. SEQ ID NO: 237, SEQ ID NO: 239 and polypeptides having at least 65% homology to a polypeptide of SEQ ID NO: 237 or SEQ ID NO: 239; and
z. SEQ ID NO: 241, SEQ ID NO: 243 and polypeptides having at least 65% homology to a polypeptide of SEQ ID NO: 241 or SEQ ID NO: 243.

14. The method according to claim 13 further comprising the step of detecting the presence of a nucleic acid sequence coding for a polypeptide from at least two of groups (a) to (q) recited in claim 1.

15. A method according to claim 13 wherein detecting the presence of a nucleic acid sequence coding for a polypeptide from at least two of the groups (a) to (i) involves use of a hybridization probe or PCR primer of:
a. an isolated, purified, or enriched nucleic add comprising one of the sequences of SEQ ID NOS: 210, 212, 214, 216, 218, 220, 222, 224, 226, 228, 230, 232, 234, 236, 238, 240, 242, 244, the sequences complementary thereto, or a fragment comprising at least 10, 15, 20, 25, 30, 35, 40, 50, 75, 100, 150, 200, 300, 400 or 500 consecutive bases of one of the sequences of SEQ ID NOS: 210, 212, 214, 216, 218, 220, 222, 224, 226, 228, 230, 232, 234, 236, 238, 240, 242, 244 or the sequences complementary thereto;
or
b. an isolated, purified or enriched nucleic acid which encodes one or the polypeptides of SEQ ID NOS: 209, 211, 213, 215, 217, 219, 221, 223, 225, 227, 229, 231, 233, 235, 237, 239, 241, 243 or fragments comprising at least 5, 10, 15, 20, 25, 30, 35, 40, 60, 75, 100 or 150 consecutive amino acids of one of the polypeptides of SEQ ID NOS: 209, 211, 213, 215, 217, 219, 221, 223, 225, 227, 229, 231, 233, 235, 237, 239, 241, 243.

16. A method according to claim 15 further comprising the step of using the detected nucleic add sequence to isolate an everninomicin-type orthosomycin biosynthetic gene cluster from the sample containing the genomic DNA.

17. An everninomicin-type orthosomycin biosynthetic gene cluster obtained from claim 16.

18. A method of identifying an avilamycin-type orthosomycin biosynthetic gene cluster comprising providing a sample containing DNA, and detecting the presence of a nucleic acid sequence coding for a polypeptide from at least one of the groups consisting of
aa. SEQ ID NO: 245, Genbank accession no AAG32068 and polypeptides having at least 65% homology to a polypeptide of SEQ ID NO: 245 or Genbank accession no. AAG32068;
bb. SEQ ID NO: 247, Genbank accession no. AAK3183, and polypeptides having at least 65% homology to a polypeptide of SEQ ID NO: 247 or Genbank accession no. AAK83183;
cc. SEQ ID NO: 249, accession no. AAG32069, and polypeptides having at least 65% homology to a polypeptide of SEQ ID NO: 249 or Genbank accession no. AA32069;
dd. SEQ ID NO: 251, Genbank accession no AAK83172, and polypeptides having at least 65% homology to a polypeptide of SEQ ID NO: 251 or Genbank accession no. AAK83172;
ee. SEQ ID NO: 253, Genbank accession no. AAK83171 and polypeptides having at least 65% homology to a polypeptide of SEQ ID NO: 253 or Genbank accession no. AAK83171; and
ff. SEQ ID NO: 255, Genbank accession no. AAK83175, and polypeptides having at least 65% homology to a polypeptide of SEQ ID NO: 255 or Genbank accession no. AAK83175.

19. The method according to claim 18 further comprising the step of detecting the presence of a nucleic acid sequence coding for a polypeptide from at least two of the groups recited in claim 1.

20. A method according to claim 18 wherein detecting the presence of a nucleic acid sequence coding for a polypeptide from at least two of the groups (aa) to (ff) involves use of a hybridization probe or PCR primer of:
aa. an isolated, purified, or enriched nucleic acid comprising one of the sequences of SEQ ID NOS: 246, 248, 250, 252, 254, 256 and the nucleic acid sequences corresponding to Genbank accession nos. AAG32068, AAK83183, AAG32069, AAK83172, AAK83171 and AAK83175; the sequences complementary thereto; or a fragment comprising at least 10, 15, 20, 25, 30, 35, 40, 50, 75, 100, 150, 200, 300, 400 or 500 consecutive bases of one of the sequences of SEQ ID NOS: 246, 248, 250, 252, 254, 256 and the nucleic acid sequences corresponding to Genbank accession nos. AAG32068, AAK83183, AAG32069, AAK83172, AAK83171 and AAK83175; or the sequences complementary thereto; or
bb. an isolated, purified or enriched nucleic acid which encodes one or the polypeptides of SEQ ID NOS: 245, 247, 249, 251, 253 or Genbank accession nos: AA32068, AAK83183, AAG32069, AAK83172, AAK83171 and AAK83175 or fragments comprising at least 5, 10, 15, 20, 25, 30, 35, 40, 50, 75, 100 or 150 consecutive amino acids of one of the polypeptides of SEQ ID NOS: 245, 247, 249, 251, 253 or Genbank accession nos: AAG32068, AAK83183, AAG32069, AAK83172, AAK83171 and AAK83175.

21. A method according to claim 18 further comprising the step of using the detected nucleic acid sequences to isolate an avilamycin-type orthosomycin biosynthetic gene cluster from the sample containing the genomic DNA

22. An evilamycin-type orthosomycin biosynthetic gene cluster obtained from claim 21.

23. A computer readable medium having stored thereon a sequence selected from the group consisting of:
a. SEQ ID NOS: 52, 54, 56, 68, 60, 62, 64, 66, 68, 70, 72, 74, 100, 102, 104, 106, 108, 110, 112, 114, 116, 124, 126, 128, 130, 132, 154, 156, 158, 160, 162, 164, 166, 168, 170, 172, 174, 176, 178, 180, 194, 196, 198, 200, 202, 204, 206, 208;
b. fragments of SEQ ID NOS: 52, 54, 56, 58, 60, 62, 64, 66, 68, 70, 72, 74, 100, 102, 104, 106, 108, 110, 112, 114, 116, 124, 126, 128, 130, 132, 154, 156, 158, 160, 162, 164, 166, 168, 170, 172, 174, 176, 178, 180, 194, 196, 198, 200, 202, 204, 206, 208 comprising at least 10 consecutive nucleotides of SEQ ID NOS: 52, 54, 56, 58, 60, 62, 64, 66, 68, 70, 72, 74, 100, 102, 104, 106, 108, 110, 112, 114, 116, 124, 126, 128, 130, 132, 154, 156, 158, 160, 162, 164, 166, 168, 170, 172, 174, 176, 178, 180, 194, 196, 198, 200, 202, 204, 206, 208;
c. nucleodde sequences at least 70% identical to SEQ ID NOS: 52, 54, 56, 58, 60, 62, 64, 66, 68, 70, 72, 74, 100, 102, 104, 106, 108, 110, 112, 114, 116, 124, 126, 128, 130, 132, 154, 156, 158, 160, 162, 164, 166, 168, 170, 172, 174, 176, 178, 180, 194, 196, 198, 200, 202, 204, 206, 208, or at least 70% identical to fragments of SEQ ID NOS: 52, 54, 56, 58, 60, 62, 64, 66, 68, 70, 72, 74, 100, 102, 104, 106, 108, 110, 112, 114, 116, 124, 126, 128, 130, 132, 154, 156, 158, 160, 162, 164, 166, 168, 170, 172, 174, 176, 178, 180, 194, 196, 198, 200, 202, 204, 206, 208; and
d. sequences complementary to the sequences of (a) (b) and (c);
for use In the detection of orthosomycin-genes, orthosomycin gene fragments, orthosomycin gene clusters and orthosomycin producing organisms.

24. A computer readable medium having stored thereon a sequence selected from the group consisting of:
a SEQ ID NOS: 210, 212, 214, 216, 218, 220, 222, 224, 226, 228, 230, 232, 234, 236, 238, 240, 242, 244;
b. fragments of SEQ ID NOS: 210, 212, 214, 216, 218, 220, 222, 224, 226, 228, 230, 232, 234, 236, 238, 240, 242, 244 comprising at least 10 consecutive nucleotides of SEQ ID NOS: 210, 212, 214, 216, 218, 220, 222, 224, 226, 228, 230, 232, 234, 236, 238, 240, 242, 244;
c. nucleotide sequences having at least 70% identical to SEQ ID NOS: 210, 212, 214, 216, 218, 220, 222, 224, 226, 228, 230, 232, 234, 236, 238, 240, 242, 244, or 70% identical to fragments of SEQ ID NOS: 210, 212, 214, 216, 218, 220, 222, 224, 226, 228, 230, 232, 234, 236, 238, 240, 242, 244; and
d. sequences complementary to the sequences of (a) (b) and (c);
for use in identifying everninomycin-type orthosomycin genes, gene fragments, gene clusters or everninomycin-type orthosomycin-producing organisms.

25. A computer readable medium having stored thereon a sequence selected from the group consisting of:
a. SEQ ID NOS: 246, 248, 250, 252, 254, 256 and the nucleic acid sequences corresponding to Genbank accession nos. AAG32068, AAK83183, AAG32069, AAK83172, AAK83171 and MK83175;
b. fragments of SEQ ID NOS: 246, 248, 250, 252, 254, 256 and the nucleic acid sequences corresponding to Genbank accession nos. AAG32068, AAK83183, AAG32069, AAK83172, AAK83171 and AAK83175 comprising at least 10 consecutive nucleotides of SEQ ID NOS: 246, 248, 250, 252, 254, 256 and the nucleic acid sequences corresponding to Genbank accession nos. AAG32068, AAK3183, AAG32069, AAK83172, AAK83171 and AAK83175;
c. nucleotide sequences 70% identical to SEQ ID NOS: 246, 248, 250, 252, 254, 256 or the nucleic acid sequences corresponding to Genbank accession nos. AAG32068, AAK83183, AAG32069, AAK83172, AAK83171 and AAK83175; or 70% identical to fragments of SEQ ID NOS: 246, 248, 250, 252, 254, 256 or the nucleic acid sequences corresponding to Genbank accession nos AAG32068, AAK83183, AAG32069, AAK83172, AAK3171 and AAK83175; and
d. sequences complementary to the sequences of (a) (b) and (c);
for use in identifying avilamycin-type orthosomycin genes, gene fragments, gene clusters or avilamycin-type orthosomycin producing organisms.

The application's sequence listing, which the Patent Office published only in electronic form, follows.

SEQUENCE LISTING (282 sequences)

SEQ ID NO: 1 - protein, 346 aa, Streptomyces mobaraensis
MAGSEDERDGGTGAERGRSVLVIGGAGFIGSHYVRELIRDGGPARVTVLDKLTYAGNPANLDPVAGRYTFVHGDICDTGLLADVVPGHDLVVNFAAESHVDRSIADAAPFIRTNVLGVQALMQVCMEAGTRKIVQVSTDEVYGSIETGSWDEDALIAPNSPYAASKAGGDMVALAYARTHGLPVSVTRCGNNYGPYQFPEKVVPLFTTRLLDGHGIPLYGDGGNVRDWVHVSDHVRGIRLVAERGLPGQVYHIAGTAELTNLELTRHLLDALGADWDRVERVADRKGHDRRYSLSDARLRALGYTPQVPFEQGLADTVRWYAENRDWWEPLNERARSGAAAPAVVG

SEQ ID NO: 2 - DNA, 1041 bp, Streptomyces mobaraensis
atggcgggcagcgaggacgagcgggacggcggcacgggcgcggagcggggcaggagcgtcctcgtcatcggcggggcgggcttcatcggctcccactacgtgcgcgaactgatccgggacggcggcccggcgcgggtgaccgtgctggacaagctgacctacgccggcaacccggccaacctggacccggtcgccggccggtacaccttcgtccacggcgacatctgcgacaccgggctgctcgccgacgtcgtccccggccacgacctggtggtcaacttcgcggcggagtcgcacgtcgaccggtcgatcgccgacgcggcccccttcatccgcaccaacgtgctgggcgtccaggccctgatgcaggtgtgcatggaggccggcacgcgcaagatcgtgcaggtctccaccgacgaggtgtacggcagcatcgagaccggctcctgggacgaggacgcgctgatcgcgcccaactcgccctacgcggcctccaaggcgggcggcgacatggtcgccctggcctacgcccggacccacgggctgccggtgagcgtgacgcggtgcggcaacaactacgggccctaccagttcccggagaaggtcgtcccgctgttcaccacccggctgctggacgggcacggcatcccgctgtacggcgacggcggcaacgtccgcgactgggtgcacgtctccgaccacgtccgcggcatccggctggtcgccgagcgcggcctgccggggcaggtctaccacatcgcgggcaccgccgagttgaccaacctggagctcacccggcacctgctggacgcgctgggcgccgactgggaccgggtcgagcgggtggccgaccgcaagggccacgaccggcgctactcgctctccgacgcccggctccgcgcactcggctacacgccccaggtgcccttcgagcagggcctggccgacaccgtgcgctggtacgccgagaaccgggactggtgggagccgctcaacgagcgcgcccgttccggggccgcggcaccggccgtcgtcggctag

SEQ ID NO: 3 - protein, 329 aa, Micromonospora carbonacea aurantiaca
VPRVFVAGGAGFIGSHYVRELVAGAYAGWQGCEVTVLDSLTYAGNLANLAGVRDAVTFVRGDICDGRLLAEVLPGHDVVLNFAAETHVDRSIADSAEFLRTNVQGVQSLMQACLTAGVPTIVQVSTDEVYGSIEAGSWSEDAPLAPNSPYAAAKAGGDLIALAYARTYGLPVRITRCGNNYGPYQFPEKVIPLFLTRLMDGRSVPLYGDGRNVRDWIHVADHCRGIQTVVERGASGEVYHIAGTAELTNLELTQHLLDAVGGSWDAVERVPDRKGHDRRYSLSDAKLRALGYAPRVPFADGLAETVAWYRANRHWWEPLRKQLDAVPHD

SEQ ID NO: 4 - DNA, 990 bp, Micromonospora carbonacea aurantiaca
gtgccgagggtcttcgtggccggtggcgccggcttcatcggctcgcactacgtgcgggaactcgtcgccggggcgtacgccgggtggcagggctgcgaggtcacggtgctcgacagcctcacctatgcgggaaacctcgcgaatctcgccggggtgcgggacgccgtcaccttcgtccgcggtgacatctgcgacggccgactgctcgccgaggtcctgcccggccacgacgtggtgctgaacttcgcggccgagacccacgtcgaccggtccatcgccgactcggcggagttcctgcggaccaacgttcagggcgtccagtcgctcatgcaggcgtgcctgaccgccggagtgccgaccatcgtccaggtctccaccgacgaggtgtacggcagcatcgaggccggatcctggagcgaggacgcgccgctggcgccgaactcgccgtacgccgcggccaaggcgggcggtgacctgatcgccctggcgtacgcgcggacgtacggactgccggtccgcatcaccaggtgcggcaacaactacggtccataccagttcccggagaaggtgatccccctcttcctcacccgtctgatggacggtcggtcggtcccgctctacggcgacgggcgcaacgtccgcgactggatccacgtggccgaccactgccgtggcatccagacggtggtcgaacgcggtgcgtccggcgaggtctaccacatcgccgggacggccgagctgaccaacctggaactcacccagcacctgctggacgcggtcggcggaagctgggacgccgtcgagagggtgcccgaccgtaagggccacgaccgccgctactcgctttccgacgcgaagctccgggccctgggctacgccccgcgcgtccccttcgccgacggcctggccgagacggtcgcgtggtaccgcgcgaaccggcactggtgggagccgctgcggaaacaactcgacgccgtcccgcacgactga

SEQ ID NO: 5 - protein, 329 aa, Micromonospora carbonacea africana
MRRVLVTGGAGFIGSQYVRDLATGAYPDTAQARVTVLDKLTYAGNLANLEPVQDRITFVQGDVCDTALLAEVLPGHDVVVNFAAESHVDRSIADSAEFVRTNVQGVQTLMQACLDAGVARVVQVSTDEVYGSIDEGSWAEDTPLAPNSPYAAAKAGGDLIALAYARTHGLPVCLTRCGNNYGPYQFPEKLIPLFVTELLNGRRVPLYGDGGNVRDWIHVTDHCRGIQTVVDRGVPGEVYHIAGTAELSNMELTGRLLDALGAGWDRVERVPDRKGHDRRYSLTDAKLRALGYRPEVAFADGLAETIDWYRTHRDWWEPLKKQADRSPVP

SEQ ID NO: 6 - DNA, 990 bp, Micromonospora carbonacea africana
atgcgtcgcgtcctggtcaccggcggtgccggtttcatcggctcgcagtacgtccgcgacctggccaccggtgcctaccccgacacggcgcaggcccgggtgacggtgctggacaagctgacgtacgcgggcaacctcgccaacctcgaaccggtccaggaccggatcaccttcgtccagggcgacgtctgcgacacggcgctgctggccgaggtgctgcccgggcacgacgtggtggtcaacttcgccgccgagtcgcacgtcgaccggtccatcgccgactcggcggagttcgtccgcaccaacgtgcagggcgtccagacgctcatgcaggcgtgtctcgacgccggggtcgcccgggtggtccaggtctccaccgacgaggtctacggcagcatcgacgagggttcctgggccgaggacacccccctggcgccgaactccccgtacgcggcggcgaaggccggcggggacctgatcgccctggcctacgcccgcacccacgggctgccggtctgcctcacccggtgcggcaacaactacgggccgtaccagtttccggagaagctgatcccgctgttcgtcaccgagctgttgaacgggcgacgggtgccgctgtacggcgacggcgggaacgtccgcgactggatccacgtgacggaccactgccggggcatccagaccgtcgtcgaccgcggtgtccccggcgaggtctaccacatcgccggcacggctgagctgtccaacatggagctgaccgggcggctgctggacgccttgggggccgggtgggaccgggtcgagcgggtgccggaccgcaagggccacgaccgccgctactcgctgacggacgcgaaactgcgggcgctcggctaccggcccgaggtcgccttcgccgacggcctggccgagacgatcgactggtaccggacgcaccgggactggtgggagccgctgaagaagcaggccgaccggtcgccggtgccctga

SEQ ID NO: 7 - protein, 348 aa, Streptomyces mobaraensis
MILSRRALITGITGQDGTYLARQLLESGYEVFGMVRGQGRPYARDGSPLHPDIRVVSGDLLDQTSLIAAVEQASPTEVYNLGALSYVPVSWKQPAVAAEVTGKGVLRMLEAIRSVAGLNASRTTGSGVPRFYQASTSEMFGKVRETPQSESTPFHPRSPYGVAKAFGHYMVQNYRESYGMFAVSGILFNHESPIRGPEFVTRKVSLGVAAVKLGLVDKLRLGNLDAERDWGFAGDYVRGMRMMLAQDEPEDIVLGTGVTHSVRDLVEFAFAHAGLDWRDHVEVDPRLLRPAEVELLCADLSRAREKLGWKPEVSFEELIAMMVDNDLRLLTESENAAGEAVLEQAGLW

SEQ ID NO: 8 - DNA, 1047 bp, Streptomyces mobaraensis
atgattctgtctaggcgagcgctcattacgggaatcacaggccaggatggcacttatctcgcgcgtcagctcctcgagtccggatacgaggtgttcggaatggtgcgcgggcaggggcggccgtacgcgcgcgacggcagtcccctgcacccggacatccgggtggtgagcggcgacctgctggaccagacgagcctgatagccgcggtcgagcaggcgagccccaccgaggtctacaacctcggcgccctgtcgtacgtcccggtctcctggaagcagcccgccgtcgccgcggaggtgaccgggaagggcgtgctgcggatgctggaggccatccgcagcgtggcggggctcaacgcgtcccggaccaccggcagcggcgtcccgcgcttctaccaggcgtccacctccgagatgttcggaaaggtgcgcgagaccccgcagagcgagtccacgcccttccacccccgcagcccctacggcgtggccaaggcgttcgggcactacatggtgcagaactaccgcgagtcctacgggatgttcgcggtcagcggcatcctgttcaaccacgagtcccccatccgcggccccgagttcgtcacccggaaggtctcgctcggggtggccgccgtgaagctcggcctggtggacaagctccggctgggcaacctcgacgccgagcgcgactggggcttcgccggggactacgtgcgcggcatgcggatgatgctcgcccaggacgagccggaggacatcgtcctgggcaccggcgtcacccacagcgtccgcgacctggtggagttcgccttcgcgcacgccggcctcgactggcgcgaccacgtggaggtcgacccccggctgctccgcccggcggaggtggaactcctctgcgccgacctcagccgcgcccgggagaagctcggctggaagcccgaggtgtcgttcgaggaactgatcgccatgatggtcgacaacgacctgcgcctgctcaccgagagcgagaacgccgccggtgaagccgtcctcgaacaggccggtctgtggtaa

SEQ ID NO: 9 - protein, 346 aa, Micromonospora carbonacea aurantiaca
LTRRALITGITGQDGTYLARHLLAAGYDVYGMVRGQNSPSARCGRQVHPDVRLVNGDLMDQSSLISAVDRVRPDEIYNLGALSYVPTSWRQPNTTAEITGTGVVRMLEAVRIVAGITSSRTPGPSRPRFYQASSSEMFGKVRETPQNELTPFHPRSPYGVAKVFGHYTVQNYRESYGMYAVSGMLFNHESPIRGPEFVTRKVSLGAAAVKLGLRDSLRLGNLMAERDWGFAGDYVRGMSMMLAQDEPDDYVLGTGIAHSVRELVELAFAHVDLDWRDHVVLDEALQRPAEVDLLCADATKAQQRLGWKPTVYFEELVGMMVDSDLRLLSGPQCSEGGVIRELADLW

SEQ ID NO: 10 - DNA, 1041 bp, Micromonospora carbonacea aurantiaca
ctgactaggcgagcgctgatcacagggattaccggtcaggacggtacttatcttgcgcggcacctcctggccgctggatatgacgtctatggaatggtgcggggccagaattcgccgagcgcgcgctgcggccggcaggtgcaccccgacgttcggcttgtcaacggcgacctgatggaccagtcgagcctgatctcggcggtggacagggttcggccggacgagatctacaacctcggcgcactgtcctacgtccccacctcgtggcggcagcccaacaccaccgcggagatcaccgggacgggcgtggtgcgcatgctcgaagccgtccggatcgtcgcaggcatcaccagctcgcgtacccccggcccgagtcggccacgcttctatcaggcctcgtcgtccgagatgttcggcaaggtgcgggagaccccccagaatgagctgacgcccttccacccacgcagtccgtacggcgtcgccaaagtgttcggccactacacggtgcagaactaccgcgagtcgtacggcatgtacgcggtctccggcatgctcttcaaccatgaatcacccatccgcggaccggagttcgtgacgcgaaaggtgtcgctgggcgcggcggccgtgaaactggggctccgggactcgttgcgactgggcaatctgatggccgagcgggactggggtttcgccggcgactacgtccgcggcatgtcgatgatgctcgcccaggacgagcctgacgactacgtcctgggtaccgggatcgcgcacagcgtgcgggagctggtcgagctggccttcgcccacgtcgacctggactggcgtgaccacgtcgtcctcgacgaggcgctccagcgtccggccgaggtcgacctgctctgcgccgacgcgacgaaggcccagcagcgcctcggctggaagccgacggtctacttcgaggagctggtcgggatgatggtcgacagcgatctccgtctgctgtcgggtccgcagtgcagtgagggcggcgtcattcgcgagctggccgatctgtggtga

SEQ ID NO: 11 - protein, 346 aa, Micromonospora carbonacea africana
LTRRALITGITGQDGTYLAEHLLQSGYEVFGLVRGQTAPSVRSLRQPDPAVKLISGDLLDQTSLVAAIERAAPDEVYNLGALSYVPVSWRQSTTTAEVTGMGVLRMLEALRIVGGLSDSRSPAAGQPRFYQASSSEMFGKVREPVQNELTPFHPRSPYGAAKAFGHYMVQNYRESYGMYAVSGILFNHESPVRGPEFVTRKVSLGVAAVKLGIRSSLRLGNLSAERDWGFAGDYVRGMVLMLAQDEPEDYVLGTGVTHSVRELVEAAFAHVGLNWRDHVVVDESLIRPAEVELLCADPTKARQRLGWKPSVSFEEMVAMMVDSDLRLLADTDGSSHAFSAELAELW

SEQ ID NO: 12 - DNA, 1041 bp, Micromonospora carbonacea africana
ctgacacggcgggcgctgatcactggaattaccggccaggacggcacgtatctcgcggagcacctgcttcagtccggatacgaggtatttggattggtgcgcgggcagaccgcgccctcggtccgcagccttcggcaacctgatccagcggtcaagctgatcagcggcgaccttctggatcagacgagcctggtggcggcgatcgaacgcgcggcgccggacgaggtctacaacctcggcgcgctgtcgtacgtgccggtgtcgtggcggcagtccaccacgacggcggaggtcaccggcatgggtgtgctccgcatgctcgaagccttgcggatcgtggggggcctgtcggattcccgcagtcccgcagccggtcagccgcgcttttatcaggcgtcttcgtcggagatgttcggcaaggtgcgggagcccgtccagaatgagctgaccccgttccatccgcgtagcccgtacggcgcggccaaggcgttcgggcattacatggtgcagaactaccgtgagtcgtacggcatgtatgccgtctccggcattctgttcaaccacgaatcaccggtgcgtggtcccgagttcgtcacccgcaaggtgtcgctgggcgtggcggcggtgaagctgggcattcgcagctcgcttcgcctgggcaacctctcggccgagcgggactggggcttcgcgggcgactacgtgcggggcatggtcctgatgctggcccaggacgagccggaggactacgtcctcggcacgggggtcacgcacagcgtccgcgagctggtcgaggcggccttcgcccacgtgggcctcaactggcgggaccacgtggtggtggacgagtcgctcatccggcccgccgaggtcgagctgctctgcgcggatccgacgaaggcccgccagcggctcggctggaaaccctccgtctccttcgaggagatggtcgccatgatggtcgacagcgatctgcgcctgttggcggacacggacgggtcttcccacgccttttccgccgaactggccgagctgtggtga

SEQ ID NO: 13 - protein, 324 aa, Streptomyces mobaraensis
MADERERVLVAGGTGFVGRRLCADLVAAGAEVAAVARRAPDLPPPCRILTLDVTTASPGELAGLIDSFRPHTLVNAIGSNWGIAERDLEANCAVPARRLMAALRRTTCRPYVVHLGSVLEYGPTAPGETTRTATPARPTTTYGKAKLAASRAVLEAAAEGVVEAGVLRIGNVAGPGTPAVSLLGRVAGRLAEAVARDTLPAVVELSQLRAHRDYVDVRDVSEAVLAATRARIPGLVVPIGRGEAVAVRWLVDLLVEVSGVPAEVRELPAATTGTAGDDWVQVDPEPARRLLGWTAVRSLRESVSGLWDETLRAHGIHDPAGARR

SEQ ID NO: 14 - DNA, 975 bp, Streptomyces mobaraensis
atggccgatgagcgcgagcgggttctcgtggccgggggaacggggttcgtgggccgccggctctgcgcggacctcgtcgccgccggggccgaggtggccgcggtcgcccggcgggccccggacctccccccgccgtgccgcatcctcaccctggacgtcaccacggcctcgcccggcgaactggccggcctgatcgactcgttccgcccgcacacgctggtcaacgccatcggcagcaactgggggatcgccgaacgggacctggaggccaactgcgccgtgcccgcgcggcgcctgatggccgccctgcggcggaccacctgccggccctacgtcgtccacctcggctcggtgctggagtacggcccgaccgcgcccggcgagacgacccggaccgcgacgccggcccggccgacgaccacctacggcaaggccaagctcgcggcgagccgcgccgtgctggaggccgccgcggagggcgtcgtcgaggcgggcgtgctgcggatcggcaatgtcgcgggcccgggcaccccggcggtcagcctgctgggccgggtggccgggcggctcgccgaggccgtcgcccgggacaccctcccggcggtcgtggagctgtcccagctgcgcgcccaccgggactacgtcgacgtgcgcgacgtgtcggaagcggtgctggccgccacccgcgcccggataccggggctcgtcgtcccgatcggacgcggcgaggccgtggcggtgcgctggctggtggacctcctcgtggaggtcagcggcgtgcccgccgaggtgcgggaactccccgccgccaccacgggaaccgccggcgacgactgggtccaggtcgaccccgagcccgcccgccggctcctcggctggaccgccgtccgctcgctgcgcgagtcggtgagcggactgtgggacgagacgctgcgggcccacgggatccacgaccccgcgggggcgcggcggtga

SEQ ID NO: 15 - protein, 314 aa, Micromonospora carbonacea aurantiaca
VSDNRVIVFGGTGFLGRQVAKNLVAAGHDVLVVARNAPRATTGYRFRAIDVSGVRPGELAAMLAAERPAAIVNATGGKWGLTGRGLEASCVGATEAILTALAMTSLVPRFVHLGSVLECGLAAPDAPGAAQRSSRPASEYDRFKLAATEAVLEAAAQGTVDPVVLRLANVTGPGVPPASLLGLVAGSLVEAARRGGHANIELTALDARRDYVDVRDVAEAIRAAIRVPGTTVPIAIGRGESVSVRTLVAMLVDISQVPATVVELPAPAAGAEDWTRVDLRPARELLGWTPRRTLSEAIGALWRHALEGDPVESR

SEQ ID NO: 16 - DNA, 945 bp, Micromonospora carbonacea aurantiaca
gtgagcgacaaccgcgtcatcgtgttcggaggcaccggcttcctggggcgccaggtcgcgaagaacctcgtggccgcggggcacgacgtgctcgtcgtggcgagaaacgcgcccagggccacgaccgggtaccggttccgggcgatcgacgtctcgggggtacggcccggggagctggccgcgatgctggccgccgagcgcccggcggcgatcgtcaacgccacgggcggcaagtggggtctgaccggacggggccttgaggcgagttgcgtcggggcgaccgaggccatcctgacggcgctggcgatgacctcgttggtgccacggttcgtgcacctcggatcggtgctcgagtgtgggctcgccgcaccggacgcgcccggggccgcccagcggtcgtcccgacccgccagcgagtacgaccggttcaagctcgccgcgaccgaggccgtgctggaggccgcggcgcaggggaccgtggacccggtggttttgcgcctggccaacgtcaccggccccggtgtgccgccggccagcctgctcggcctggtggccggcagtctggtcgaggcggcacgtcgtggcgggcacgcgaacatcgagctgaccgcgctggacgcccgccgcgactacgtggacgtgcgcgacgtcgccgaggcgatccgggccgcgatccgggtgcccggcacgaccgttcccatcgccatcggccggggcgagtcggtgtccgtgcgcacgctggtcgccatgctcgtcgacatcagccaggtgccggccaccgtggtcgaactgccggcgccggccgcaggcgccgaggactggacccgggtcgacctgcggccggcgcgtgagctgctcggctggacgccgcggcggacgctgtccgaggcgatcggggcgctctggcgccacgcgctggaaggcgacccggtggaaagccggtga

SEQ ID NO: 17 - protein, 317 aa, Micromonospora carbonacea africana
MGARRVVVVGGTGFVGRHVSAALAARGDDVLVLARRVPSAGLPYRARALDVATLEPAALAAVFDAEQPDAVVNATGGKWNLTDAELPSSCTIPTWSVTAALERTRCRPRLVHLGSVLERVQEPPGAPAGATVPTQPESMYGRAKLAATQAVLAATRAGSVDATVLRLANVVGPGVPPDSLLGRVVVRLVDAAGRDRSARVELSPLRAHRDYVDVRDVAEAVVSATRESVTGRVIGVGRGEAVPVRSLVEMLIEVSGVPTEVVELPDRPGSVEVVDWARVDPGPARDLLGWRPRRSLRDAVGGLWDEAASRLPDRSRR

SEQ ID NO: 18 - DNA, 954 bp, Micromonospora carbonacea africana
atgggcgcgcggcgtgtcgtggtcgtcggtggtacgggcttcgtcgggcgtcacgtgagcgccgcgcttgccgcccggggcgacgacgtcctcgtgttggcccgccgcgtcccgtcggcggggctgccgtaccgggcccgggcgctggacgtcgccaccctggagcccgccgcgctggccgccgtgttcgacgccgagcagcccgacgcggtggtcaacgccaccggcggcaagtggaacctgacggacgccgagctgccgtcgagctgcacgatcccgacgtggagtgtcaccgcggcgctggagcgcacccgttgccggcccaggctggtgcacctcggctcggtcctggaacgcgtccaggagccacccggggctcccgccggtgccacggtgcccacccagccggagagcatgtacggcagggcgaagctggccgccacccaggccgtgctcgcggcgacgcgggccggctcggtggacgcgacggtgctgcggctcgcgaacgtggtgggtccgggcgtgccacccgacagcctgttggggcgggtcgtcgttcgcctggtcgacgcggcgggccgcgaccggtcggccagggtggagttgtctccgttgcgcgcccaccgggactacgtcgacgtgcgggacgtcgccgaggcggtggtgtcggccacgcgggagtccgtcaccgggcgggtgatcggcgtggggcggggggaggccgttccggtccgctccctcgtggagatgttgatcgaggtgagcggggtgccgaccgaggtggtggagttgccggatcggcccggctcggtggaggtcgtcgactgggcccgcgtcgacccggggcccgcgcgtgacctgctcgggtggcggccccgacgatcgctgcgggatgcggtgggcgggctctgggacgaggccgcgagtcggcttcccgatcggtcccggcgctga

SEQ ID NO: 19 - protein, 320 aa, Streptomyces mobaraensis
MFPGFPDGTRLLVTGGAGFIGSHLVDALLEAGAEVTVLDDLTTGDPERLDPRAELRRVDVADAAALGEAVRSVRPDAVCHLAAQIDVRVSVADPAADARVNVEGTINVLEAARAVGARVVFASTGGALYGEGVPVPTGEDTLPGPGAPYGTAKYCAEQYVGLFNRLHGTRHSVLRLGNVYGPRQSPGGEAGVIAIHCGLARDGEVPTVFGDGTQTRDYVYVGDVAEAFLAALRHPAPGVWNIGTGKGSTVLEVLDHIAAASGRELRPRFAPRRPGEIQHSTLDVSRAAADLGWTASVPLEKGIAATYDWVRSGSPVRQRA

SEQ ID NO: 20 - DNA, 963 bp, Streptomyces mobaraensis
atgttcccggggttcccggacggaacgcgtctgctggtgaccggaggggcgggcttcatcggctcgcacctcgtcgacgcccttctggaggccggggccgaggtcaccgtcctggacgacctgaccaccggcgatccggagcggctggacccgcgggcggagctgcgccgcgtcgacgtggccgacgccgccgccctcggcgaggcggtgcggtccgtacgccccgacgccgtctgccacctcgcggcgcagatcgacgtccgggtctcggtggccgacccggccgccgacgcgcgggtcaacgtggaggggacgatcaacgtgctggaggcggcccgggccgtcggggcgcgggtggtgttcgcctccaccggcggggccctctacggggagggcgtcccggtcccgaccggcgaggacacgctgcccggtccgggcgccccctacggcaccgccaagtactgcgcggagcagtacgtcggcctcttcaaccggctgcacggaacgcggcacagcgtgctgcggctcggcaatgtgtacgggccccggcagagcccgggcggagaggcgggcgtcatcgccatccactgcgggctggcccgcgacggcgaggtgcccaccgtgttcggcgacggtacgcagacccgcgactacgtgtacgtcggcgacgtcgccgaggcgttcctcgccgccctccggcatcccgcgcccggcgtctggaacatcggcacgggcaaggggagcacggtgctggaggtcctcgaccacatcgccgccgcctcgggccgcgagctgcgtccccgcttcgcgccccgccggccgggcgagatccagcacagcacgctggacgtctcccgcgccgccgccgacctgggctggaccgcgtccgtcccgctggagaagggcatcgccgccacctacgactgggtccgctccggctcgcccgtccggcagcgggcctga

SEQ ID NO: 21 - protein, 159 aa, Micromonospora carbonacea aurantiaca
  misc_feature: N-terminus only
MRVLVTGGAGFIGSHLVDALLERGDTVTVVDDLSTGRCGRLAVRVAFHQESITDGKALAAIVADARPDLIYHLAAQADVRTSVADASGDTGVNVLGTVNVLEAARAVGARVVFASTGGALYGAISAIPSPEDARPEPAAPYGAAKYCAEQYVALYNRLY

SEQ ID NO: 22 - DNA, 480 bp, Micromonospora carbonacea aurantiaca
  misc_feature: N-terminus only
atgcgcgtcctcgtgacaggtggcgccggcttcatcggctcacacctggtcgacgccctgctggagcgcggcgacaccgtcaccgtggtcgacgacctctccaccggccggtgcggccggttggccgtccgtgtcgccttccatcaggagtccatcaccgacgggaaggctctcgccgcgatcgtggcggacgcccgtccggacctgatctaccacctcgccgcgcaggccgacgtccgcacctcggtcgcggatgccagcggcgacaccggggtcaacgtgctcggcaccgtcaacgtcctggaggcggcccgagccgtcggggcccgggtggtgttcgcctccaccggcggagccctgtacggggcgatcagcgcgatcccgtcccccgaggacgcccgcccggagcctgcggcgccgtacggcgccgccaagtactgcgcggagcagtacgtggccctctacaaccggctgtacggc

SEQ ID NO: 23 - protein, 49 aa, Micromonospora carbonacea aurantiaca
  misc_feature: C-terminus only
ARLGELQHSALDVTRAGRELNWTARTALAEGIARAYQWIRDQDGCDVEA

SEQ ID NO: 24 - DNA, 150 bp, Micromonospora carbonacea aurantiaca
  misc_feature: C-terminus only
gcccgtctcggcgagctccagcattccgccctcgatgtgacccgggccggccgggagttgaactggaccgcacggacagccctcgccgagggaatcgccagggcctaccagtggatcagggaccaggacggttgcgacgtcgaggcatga

SEQ ID NO: 25 - protein, 308 aa, Micromonospora carbonacea africana
VTGGAGFIGSHLTDALLERGDSVTVLDDLSTGRPERLPAGVPLHHGSITDRAGLTRLAEQCRPEVICHLAAQADVRNSVADATSDTGVNVVGTVNVLEAARAIDARVVFASSGGALYGEVDELPSPEDVRPAPWAPYGAAKYCAEQYLALYNRLYGSTHAALRLGNVYGPRQDPTGEAGVVSIFCGCLVAGRRPTVFGDGEQTRDYIYVADVVEAFLLAVGHGGPGLWNIGTGTSTSIRKLLDLVGRTAGRVPDPRFEPPRLGELKHSALEVTRAARELRWAARTRLADGIAKVYKWVEADEPVRGER

SEQ ID NO: 26 - DNA, 927 bp, Micromonospora carbonacea africana
gtgaccggcggagccgggttcatcggctcccacctcaccgacgcgctgctcgaacgcggcgacagcgtcaccgtgctcgacgacctgtccaccgggcggcccgagcggctgcccgccggggtgccgctgcaccacgggtcgatcaccgaccgggccgggttgacccggctggccgagcagtgtcgcccggaggtcatctgccacctggccgcccaggcggacgtgcgcaactcggtggccgacgccacctcggacaccggggtcaacgtggtcggcaccgtcaacgtcctggaggccgcccgggccatcgacgcccgggtggtcttcgcctccagcggcggcgccctctacggggaggtcgacgagctgccctcccccgaggacgtccggccggcgccgtgggcgccgtacggggccgccaagtactgcgcggagcagtacctggcgctctacaaccggctctacggctcgacccacgcggcgctgcggctcggcaacgtgtacgggccacgccaggacccgaccggcgaggccggggtcgtctcgatcttctgcggctgcctggtggccgggcgccggccgacggtgttcggcgacggcgagcagacccgggactacatctacgtggccgacgtggtggaggcgttcctgctcgcggtcgggcacggtggccccggcctgtggaacatcggcaccgggacctccaccagcatccgcaaactactggacctggtcggccgcaccgccgggcgcgtcccggacccccgcttcgagccaccccgcctgggcgagctgaagcactccgcgctggaggtgacccgcgcggcccgggagctgcgctgggcggcccgaacgaggctcgccgacggcatcgcgaaggtctacaagtgggtcgaggcggacgaaccggtccggggggagcgatga

SEQ ID NO: 27 - protein, 314 aa, Streptomyces mobaraensis
VTTAHPLPGGRTAVIGATGFIGSRLTAALTAGDPRVPAAFNRAVPPVADGRAAPGLAEADIVYFLAAGLSPILAERRPDLVEAERRLLIEVLDALAAAGRRPVFVLAGSGGAVYAPEVAPPYRETTPTRPDSAYGHAKLRLEHELFRRRDAVRAVVARLSNVYGPGQRPVRGFGVLPHWLRAAVRGEPVRVFGDPHVVRDYVHVDDVTRFLLALRTRIAGGRLPSVVNIGSGVPTSLSGLLDIVSEVTGGSVAVRWERGRSFDRQGNWLDVARADAEFGWRAAIPLAEGVRACWERVLDDAGRAASVSTSVSTL

SEQ ID NO: 28 - DNA, 945 bp, Streptomyces mobaraensis
gtgaccacggcacacccgctgcccggcggccgtacggcggtgatcggcgcgaccggcttcatcggatcccggctgacggccgccctcaccgccggggacccgcgcgtcccggccgccttcaaccgggcggtcccgccggtggccgacggccgcgcggcaccgggactggccgaggccgacatcgtctacttcctggccgccgggctgagcccgatcctggccgaacggcggcccgacctggtggaggccgaacgccgcctcctgatcgaggtgttggacgcgctggccgcggcgggccgccgtccggtgttcgtgctggccggctcgggcggcgcggtctacgcgcccgaggtcgcgccgccgtaccgggagaccaccccgacccgccccgactccgcctacgggcacgccaaactccgcctggaacacgagctgttccggcgccgggacgcggtccgcgccgtggtggcgcggctgagtaacgtctacggccccggccagcggcccgtccgcgggttcggcgtgctgccgcactggctgcgggcggccgtccggggcgagcccgtgcgggtgttcggcgatccgcacgtggtccgggactacgtccacgtcgacgacgtcacccggttcctgctcgcgctgcgcacccggatcgccggcggccggctgccctccgtggtcaacatcggctccggcgtgccgacttcgctgagcggcctgctggacatcgtgtccgaggtgaccggcggctccgtcgcggtgcgctgggagcggggccgctccttcgaccggcagggcaactggctggacgtcgcgcgggccgacgccgagttcggctggcgggccgcgatcccgctggccgagggcgtccgcgcgtgctgggagcgggtgctcgacgacgccggccgggccgcttccgtctcgacgtccgtctcgacgctctag

SEQ ID NO: 29 - protein, 307 aa, Micromonospora carbonacea aurantiaca
VTAAQVRRCPTAVIGATGFIGSRLVAQLTRAGHPVARFNQAHPPVVDGRPAAGLCDAEIVLFLAARLSPALAERHPELIVAERRLLVDVLTALRHSAPFPVFVLASSGGTVYSPDACPPYDESALTRPTSAYGRAKLGLERELLGHADHVRPVILRLSNVYGPGQRPAHGYGVLSHWLDAAARRQPIRVFGDPEVVRDYVHVDDVAEILKAVHRRTVTTGPEGIPTVLNVGSGAPTSLADLLAVVSTVVDQRIEVIWEGGRQFDRGGNWLDSSLAHETLGWRARIGLTDGVRECWEHVLAHQTAAER

SEQ ID NO: 30 - DNA, 924 bp, Micromonospora carbonacea aurantiaca
gtgacggcagcccaggtgaggagatgcccgacggccgtcatcggcgccaccgggttcatcgggtcccggctcgtggcccaactgacccgcgcggggcacccggtcgcccgcttcaaccaggcgcacccgccggtggtcgacgggcgcccggctgccggcctgtgcgacgccgagatcgtactgttcctcgccgcacggttgagcccggcgctcgccgagcgccatccggaactgatcgtcgccgagcgcaggctgctcgtcgacgtcctgacggccctgcggcactccgcccccttcccggtgttcgtactggccagctcaggcggcacggtgtactcgccggacgcgtgcccgccgtacgacgaatcggcgttgaccaggcccacgtcggcgtacgggcgcgccaagctcgggctggaacgcgaactgttgggtcacgccgaccatgtccgtcccgtgatcctgcggctcagtaacgtctatgggcccggccagcgcccggcgcacggctacggcgtgctgtcgcactggctggacgccgcggccaggcggcagccgatccgggtcttcggtgatccggaggtggtccgcgactacgtgcacgtggacgacgtcgccgagatcctcaaggccgtgcaccgccgtacggtcactaccggtccggagggaatcccgaccgtgttgaacgtcggctcaggggcgcccacctccctggccgatctgctcgcggtggtgtcgacagtggtcgaccagcggatcgaggtgatctgggaaggcggtcgccagttcgacagaggtggcaactggctggactcctcgttggcacacgagaccctcggctggcgggccaggatcggtctgacggacggcgtacgtgaatgctgggaacacgtgctcgcgcatcagaccgccgccgagcgatga

SEQ ID NO: 31 - protein, 423 aa, Micromonospora carbonacea africana
VQLRRPAAVVGATGFIGSRLVSRLAEAGHPVARFSRAAPPVVDGRPAPGLREAQVVYFLAARLSPALAEQQPERVVRERELLLDVLSALAGVDHRPVFVLASSGGAVYTPTVWPPYHERSATGPASAYGRAKLRLEQELLRHTDRVQPVVTRLSNVYGPGQRPTPGYGVLSHWLEATVRGEPIRLFGDPAVVRDYVHVDDVTAIMEVIAQRAGDGDRDRLPTVVNVGSGLPTSLAELLQTMSTVAGRELEVIRDVRRQFDHRGNWLDTTLARETLGWQARISLPDGVRQCWEAVLTRAGGPGGSPARPSARLGRASRGREPPQPRPSQQFVAQPGGGRRGVAEGQWQGEPGFRGRTVPVPFLAQAGPCLVPSGLAPPLPVRPPQQVPGGQPARVDVMGDRVVREQLLAGAGGLHGADEGGVLP

SEQ ID NO: 32 - DNA, 1272 bp, Micromonospora carbonacea africana
gtgcagttgcgacgccccgcagcggtggtcggcgccaccggcttcatcggctcacgcctcgtctcccgcctggccgaggccgggcatccggtggcgcgcttcagccgtgccgccccacccgtcgtcgacggccggcccgcgccggggctccgcgaggcgcaggtcgtctacttcctcgccgcccggctgagcccggcgctggcggagcagcaaccggaacgggtcgtccgggaacgcgagttgttgctggacgtgctaagtgcgctggcgggggtggaccaccggccggtgttcgtcctggccagctcgggcggggcggtgtacacgccgacggtgtggccgccctaccacgagcggtcggccaccgggcccgcctcggcgtacggccgggcgaagctgcggctggaacaggagctgctgcgccacaccgaccgggtgcagccggtggtgacccggctgagcaacgtctacggtccggggcagcggccgacccccgggtacggtgtcctgtcacactggctggaggccaccgtgcgcggagagccgatccggctcttcggcgatccggccgtggtgcgggactacgtacacgtcgacgacgtcaccgcgatcatggaggtcatcgcgcagcgggccggtgacggcgaccgggaccggctgcccacggtcgtgaacgtcggctcgggcctgcccacctccctcgccgagttgctccagacgatgtccacggtggccggtcgtgagctggaggtcatccgggacgtccgccggcagttcgaccatcggggcaactggctcgacaccaccctcgcccgggagaccctgggctggcaggcgcggatcagcctccccgacggcgtccgccagtgctgggaggccgtcctcacccgggcgggcggcccggggggttccccggcccgaccgtcagcccggctcgggagagcgtctcgggggcgggaaccgccgcaaccgcgcccttcgcagcagttcgtggctcaacccggcggcggtcgccgcggtgtagccgagggccagtggcagggcgagccgggattccggggccgtacggtgccggtcccattccttgcgcaggccggcccgtgcctggttccgtccggcctcgcaccgcccctgccagtacgcccgccgcagcaggtaccggggggtcagccggcccgggtcgatgtcatgggtgaccgcgtggtccgggagcagttgctcgcgggcgccggcggccttcatggcgctgatgaaggaggtgtcctcccctga

SEQ ID NO: 33 - protein, 342 aa, Streptomyces mobaraensis
MAHCLVTGGAGFIGSHVAEALLGLGHRVSVLDDLSGGSAERVPDGAELFVGSVTDAELVDKLFAEQRFDRVFHFAAFAAEAISHSVKSLNYGTNVMGSVNLINAALHHGVSFFCFASSVAVYGHGETPMRESSIPVPADSYGNAKLTVERELETTMRTQGLPFTAFRMHNVYGEWQNMRDPYRNAVAIFFNQILRGEPISVYGDGGQVRAFSYVKDIVDVIVRAPETEAAWGRAFNVGSSRTNTVLELAQAVRRAAGAPDHPIAHLPARDEVMVAYTATEEAREVFGDWADTPLADGLARTAAWAASVGPAELSPSFDIEIGGEHVPEWAQCVADRLSAAGR

SEQ ID NO: 34 - DNA, 1029 bp, Streptomyces mobaraensis
atggcgcactgtctggtgaccggcggagccggcttcatcggctcgcacgtggcggaggccctgctcggcctcgggcaccgggtgtcggtcctcgacgacctcagcggcggcagcgccgagcgcgtacccgacggtgcggagctgttcgtcggctcggtgaccgacgcggagctggtcgacaagctcttcgccgagcagcggttcgaccgcgtcttccacttcgcggcgttcgccgccgaggccatcagccactcggtcaagagcctcaactacggcaccaacgtcatgggcagcgtgaacctcatcaacgccgccctgcaccacggggtctccttcttctgcttcgcctcctcggtcgcggtgtacggccacggcgagaccccgatgcgggagtcgtcgatcccggtcccggccgacagctacggcaacgccaagctcacggtcgagcgcgagctggaaacgaccatgcgcacccagggcctgcccttcacggccttccgcatgcacaacgtgtacggcgaatggcagaacatgcgcgacccgtaccgcaacgcggtcgccatcttcttcaaccagatcctgcgcggcgagccgatctccgtgtacggcgacggcggccaggtccgggcgttcagctacgtgaaggacatcgtggacgtcatcgtccgcgcccccgagaccgaggccgcctggggccgggccttcaacgtcggctcgtcccgcaccaacaccgtgctggagctcgcccaggccgtgcgccgggcggccggcgcccccgaccaccccatcgcccacctgccggcccgcgacgaggtgatggtcgcctacaccgccaccgaggaggcccgcgaggtcttcggcgactgggcggacaccccgctggcggacggcctggcccgcaccgccgcctgggccgcctccgtcggccccgccgagctgagcccctcgttcgacatcgagatcggcggggagcacgtcccggagtgggcgcagtgcgtggccgaccggctcagcgccgccggccgctga

SEQ ID NO: 35 - protein, 342 aa, Micromonospora carbonacea aurantiaca
MAHCLVTGGAGFIGSHLAGRLTSDGHRVTVLDDLSGGSASRVPAGADLIVGSVTDADLVERAFAEHRFDRVFHFAAFAAEAISHSVKKLNYGTNVMGSINLINASLQTGVSFFCFASSVAVYGHGETPMRETSIPVPADSYGNAKLVIERELEVTARTQGLPFTAFRMHNVYGEWQNMRDPYRNAVAIFFNQILRGEPITVYGDGGQVRAFTYVGDVVDVVCQAPDVEEAWGRSFNVGAASTNTVLELAEAVRVAAGVPDHPIVHLPARDEVRVAYTATDSARKVFGDWADTPLADGLARTATWAAGVGPTELRSSFDIEIGGHQVPEWARLVEKRLGSAPR

SEQ ID NO: 36 - DNA, 1029 bp, Micromonospora carbonacea aurantiaca
atggctcactgcctggtcacgggtggcgccggtttcatcggttcgcacctggcgggacggttgaccagtgacgggcaccgggtcaccgtgctcgacgatctcagcggcggcagcgcctcccgcgtgcccgcgggcgccgatctgatcgtcggctcggtgaccgacgccgacctggtggaacgggccttcgccgagcaccgcttcgaccgggtcttccacttcgcggccttcgcagccgaagcgatcagccactcggtcaagaagctcaactacggcaccaacgtgatgggcagcatcaacctcatcaacgcgtcgttgcagaccggggtgtcgttcttctgcttcgcctcctcggtcgccgtctacggtcacggtgaaacgccgatgcgagaaacctccatcccggtgccggcggacagctacggcaacgccaagctcgtcatcgagcgcgaactcgaggtgacggcgcggacgcagggccttccgttcaccgccttccgcatgcacaacgtctacggcgagtggcagaacatgcgcgacccgtaccggaacgcggtcgcgatcttcttcaaccagatcctgcgtggcgagccgatcacggtctacggcgacggcggtcaggtgcgggcgttcacgtacgtgggcgacgtcgtggacgtggtgtgccaggcgcccgacgtcgaggaggcctggggccggagcttcaacgtgggcgcggccagcaccaacaccgtgctggagctcgcggaggcggtccgggtggcggccggcgttccggatcatccgatcgtgcacctgcccgcgcgcgacgaggtccgggtggcgtacaccgcgaccgacagcgcccggaaggtcttcggcgactgggcggacaccccgctggcggacggactggcccggaccgccacgtgggcggccggtgtgggaccgacggaactgcgatcgtcgttcgacatcgagatcggcggccatcaggttccggagtgggcgcggcttgtcgaaaagcgcctgggatcggcgcctcgctga

SEQ ID NO: 37 - protein, 342 aa, Micromonospora carbonacea africana
MVRCLVTGGAGFIGSHLVESLVRNGHRVTVLDDLSGGSRQRVPAGVDLAVGSVTDVDFVDSLFAENRFERVFHFAAFAAEAISHSVKQLNYGTNVMGSINLINASLRTGVRFFCFASSVAVYGHGETPMRESVVPVPADSYGLAKYLVERELEVTMRTQGLPFTAFRMHNVYGEWQNMRDPYRNAVAIFFNQILRGEPITVYGDGGQVRAFTYVGDVVNVVSRAAETEAAWGRAFNVGSSSTNTVLELAQAVRSAAGVPEHPIAHLPSRDEVRTAYTATELARSVFGDWTDTPLAEGLARTARWAADAGPAELQSSFDIEIGGDRIPEWARLVNERLSTASR

SEQ ID NO: 38 - DNA, 1029 bp, Micromonospora carbonacea africana
atggttcgttgtctggtgactggtggtgccggattcatcggctcgcacctggtggagtcattggtcaggaatgggcaccgggtcaccgttctggacgacctcagcggcggcagccggcagcgggttccggccggggtggacctggccgtcggttcggtgaccgacgtggacttcgtcgattcactgttcgccgagaaccgattcgagcgggtcttccactttgccgccttcgcggcggaggcgatcagccattcggtgaagcagctcaactacggcaccaatgtgatgggcagcataaatctgatcaacgcgtcgctgcgtaccggcgtgcggttcttctgcttcgcctcctccgtggcggtctacggccacggcgagacgccgatgcgcgagtccgtcgtccccgtccccgcggacagctacggcctggccaagtacctggtcgagcgcgagctggaggtgacgatgcggacccaggggctgcccttcaccgccttccgcatgcacaacgtctacggcgagtggcagaacatgcgggacccgtaccgcaacgcggtcgccatcttcttcaaccagatcctgcgaggcgagccgatcaccgtgtacggcgacggcggccaggtccgcgcgttcacgtacgtcggtgacgtggtgaacgtggtcagccgcgccgccgagaccgaggccgcgtgggggcgggcattcaacgtgggctcgtcgagcaccaacaccgtgctggagctggcccaggcggtacggtcggcggccggcgtgccggagcatccgatcgcccacctgccgtcgcgggacgaggtgcgaaccgcgtacaccgcgacggagctggcccgatcggtcttcggcgactggacggacaccccgctggccgagggactggcccgcaccgccaggtgggcggccgacgccgggccggcggaactccagtcgtccttcgatatcgagatcggcggggaccggattccggaatgggcccggctggtcaacgaaaggctcagcacggcgagccgctga

SEQ ID NO: 39 - protein, 466 aa, Streptomyces mobaraensis
VVSLPAGPAGGLVRSLPPESYLADFAGAEFIDWFARCSAAARCRVTRTPLTELRRWRFDADTGNLGHDSGAFFVVEGLQVRTGYGPVREWSQPIINQPEIGILGMLVKEVDGVPYCLVQAKIEPGNHNGIQVSPTVQATRSNYTRIHQGRSTRYLEYFTDPGAGRTLVDVLQSEQGSWFLRKRNRNMVVQVTEDVPAGEDHHWLPLPELRRLLRIDGLVNMDTRTVLACLPADTFPASQPVPAGDAASALVLSTTGRGRALNDTATVLRWFTGAKSRHELSAHRIPLRDLPGWRSTPEQITHEDGRHFSIIGVTAEVGNREVAAWDQPLLYPEGRGVVAFVIKVIEGVAHLLVHARFQPGLLDGMEMGPTVQCVPENYPDGPPRFLDYVLNAPRERVLYNAVLAEEGGRFYHSQNNYLLVEAGDDFPTAVPEDYCWMTAHQLTLLLRHGYYVNVEARSLLACLQSW

SEQ ID NO: 40 - DNA, 1401 bp, Streptomyces mobaraensis
gtggtaagcctcccggccggaccggccggcgggctcgtacggtccctcccgccggagtcgtacctcgcggacttcgccggcgccgagttcatcgactggttcgcccggtgctccgccgccgcgcggtgccgggtgacccggacgccgctgaccgagctgcggcgctggcggttcgacgccgacacggggaacctcgggcacgactccggggccttcttcgtcgtcgagggcctccaggtgcggaccgggtacggaccggtccgcgagtggagccagcccatcatcaaccagcccgagatcggcatcctcggcatgctggtcaaggaggtcgacggcgtcccgtactgcctcgtgcaggccaagatcgagcccggcaaccacaacggcatccaggtgtcgccgaccgtccaggccacgcgcagcaactacacccgcatccaccagggccggagcacccgctacctcgagtacttcacggaccccggcgcgggccgcaccctggtcgacgtcctgcagtccgagcagggctcctggttcctgcgcaagcgcaaccgcaacatggtcgtgcaggtcaccgaggacgtcccggccggcgaggaccaccactggctgccgctgcccgaactgcggcggctgctgcggatcgacggcctggtcaacatggacacccggaccgtactggcctgcctcccggcggacacgttccccgcgtcccagccggtgccggccggggacgccgcgtcggcgctcgtcctctcgacgacgggccggggccgcgccctgaacgacacggcgaccgtgctgcgctggttcaccggcgccaagagccggcacgaactgtcggcgcaccggatccccctgcgcgacctgcccgggtggcgcagcaccccggagcagatcacccacgaggacgggcggcacttcagcatcatcggggtgaccgccgaggtcggcaaccgcgaggtggccgcatgggaccagcccctgctgtacccggaagggcgcggcgtcgtcgcgttcgtcatcaaggtgatcgaaggggtcgcgcacctgctggtccacgcccggttccagcccggcctgctggacgggatggagatggggccgaccgtgcagtgcgtcccggagaactacccggacgggccgccgcggttcctcgactacgtcctgaacgccccccgggagcgcgtcctctacaacgccgtcctggccgaggaggggggccgcttctaccactcgcagaacaactacctcctcgtcgaagccggcgacgacttccccacggccgtccccgaggactactgctggatgaccgcgcaccagctcaccctgctcctccggcacggctactacgtcaacgtcgaggcgcgcagcctgctggcctgcctgcagagttggtga

SEQ ID NO: 41 - protein, 470 aa, Micromonospora carbonacea aurantiaca
VSELPALSEGKLMTSGDDPMEWWEPAAGGVSPAFRSWLAERSTMTSCEVERIRLDELRGWAFDETTGNLAHESGRFFVVEGVHVRTTYGAVAEWYQPIINQPEIGILGMLMKLVDGVPHCLLQAKVEPGNINMMQLSPTVQATRSNYTRVHGGGGTRYLEYFTRPGAGRVLVDVLQSEQGSWFLHKRNRNMVVLVDDVPPSDYHYWLPLHEVRRLLRIDVLVNMDTRSVLSCLPSTFFAGSGVVPANSAMAAALARSASGEGPSHRSTEAVLSWFTEAKSRHELAVSRISLRDLRGWRHTPYEISREDGRHFSIVGVTVRINNREVTEWSQPLLHPRQRGIIAFALRIINGVAHVLVHARFQVGLLDAMEMGPTVQCTPSSDAEQRPPFLDLILNAPSERILFDTVLAEEGGRFYRAENRYMLVEVGDDLPAVPDTFCWVAVHQLATLLRHGYYLNVEARSLLACLHSLW

SEQ ID NO: 42 - DNA, 1413 bp, Micromonospora carbonacea aurantiaca
gtgagcgagcttcccgcgttgtccgagggcaagctcatgacgtccggggatgacccgatggagtggtgggagccggcggcgggcggggtgagccccgccttccggtcctggcttgccgaacggtcgacgatgacctcctgcgaggtggagcggatccggctggacgagctgcgtggttgggcgttcgacgagaccaccggcaacctggcgcacgagagcggccgcttcttcgtggtcgagggcgtgcacgtgcgaacgacgtacggtgcggtggcggagtggtaccagccgatcatcaatcagccggagatcgggattctcggcatgttgatgaagctcgtcgacggcgtcccgcactgcctgttgcaggcgaaggtcgagccgggcaacatcaacatgatgcagctgtcgcccaccgtgcaggcgacccgcagcaactacacgcgggtccacgggggcggcggcacgaggtatctcgaatacttcacccggccgggcgccggccgggtcctggtcgacgtgttgcagtccgagcagggctcctggttcctgcacaagcggaaccgcaacatggtcgtgctggtcgacgacgtgccgccctccgactaccactactggctgccgctgcacgaggttcggcggctcctgcgcatcgacgttctggtcaacatggacacccgttccgtgctgtcctgcctgccgtcgaccttcttcgccggttcgggagtggtccccgcgaactccgccatggccgccgcgctggcccggtccgccagcggcgagggtccgtcgcaccgctccacggaggcggtgctgagctggttcaccgaggccaagagccggcacgagctggcggtgagccggatctcgctccgcgacctgcgcggctggcggcacacgccgtatgagatctcccgcgaggacgggcgacacttcagcatcgtcggggtcacggtacgcatcaacaaccgtgaggtcaccgagtggagtcaaccgttgctgcatccgcggcagcgggggatcatcgcattcgcgctcaggatcatcaatggggtggcgcacgtgctggtgcacgctcggttccaggtggggctgctggatgccatggagatgggacccacggtccagtgcacgccgagttcggatgccgaacagcggcctcctttcctcgacctgatactcaacgccccgagcgagcggatcctgttcgacaccgtcctcgcggaggagggcggccggttctaccgcgccgagaaccgctacatgctggtggaggtcggcgacgaccttccggcggtgccggacaccttctgctgggtcgccgtccatcagctcgccacgctgctgcggcacggctactacctcaacgtcgaagcacgcagtctgcttgcctgcctgcacagcctgtggtga

SEQ ID NO: 43 - protein, 484 aa, Micromonospora carbonacea africana
VSDSSPDPKVRADGPLLTRDAGPHRPGPVDGGSWSALHAEGVRPDFLSWFAERTRSTYCRVDRVPLDRLPGWAFDPVTGNLGHESGRFFVIEGLHVQTTYGAVREWHQPIINQPEIGILGMLVKVVDGTPYCLLQAKVEPGNINVMQLSPTVQATRSNYTRVHRGGGTKYLDYFTRPGAGRVLVDVLQSEQGSWFLRKRNRNMVVQVDEDVPAGDYHRWLPLRELLALLRVDGLVNMDTRTVLSCLPSAFYAAAQETEAPSSPAVAAIVRSAAGAPGRHDLVSVLSWFTGAKGRHEMTVRRVPLRGLPDWRHTADGIARDDGRHFSVVGVTVRIDNREVTGWSQPLLYPRHRGVVAFLVKEIDGVAHLLVHARYQAGLLDAMEMGPTVQCIPDNQPGPRPLFLAEVLEAAPERVLYDTVLTEEGGRFYRSENRYLLVDAGDDFPTEVPDEFCWVTVRQLEALLRHGYYLNIEARSLLACLRSLW

SEQ ID NO: 44 - DNA, 1455 bp, Micromonospora carbonacea africana
gtgagcgattcgtcgcccgacccgaaggtccgcgccgacgggccgttgctgacccgggacgcgggcccgcaccggcccggcccggtcgacggcggctcgtggtcggcgttgcacgccgagggggtccggccggacttcctctcctggttcgccgagcggacccggtcgacctactgccgggtggaccgcgtgccgctggaccggctgcccgggtgggcgttcgacccggtgaccggcaacctcgggcacgagagcggccggttcttcgtgatcgaggggctgcacgtccagaccacctacggcgcggtgcgcgaatggcaccagccgatcatcaaccagccggagatcggcatcctcggcatgctcgtcaaggtcgtcgacgggacaccgtactgcctgctccaggccaaggtggagcccggcaacatcaacgtcatgcagctctcgccgacggtgcaggccacccggagcaactacacccgggtgcaccgtggcggcggcacgaagtacctcgactacttcacccgcccgggggccggtcgggtgctggttgacgtcctgcagtcggagcagggctcctggttcctgcgcaagcgcaaccggaacatggtggtccaggtcgacgaggacgtgccggccggcgactaccaccggtggctcccgctgcgcgaactgctcgcgctgctgcgggtggacggcctggtcaacatggacacgcgtacggtgctgtcatgtctgccctcggccttctacgccgcggcccaggagaccgaggcgccgtcgtcgccggcggtggcggcgatcgtgcgctcggcggcgggcgcccccggccgccacgacctggtgtcggtgttgagctggttcaccggggccaagggccggcacgagatgaccgtgcggcgggtgccgctacgagggctgccggactggcggcacaccgcggacgggatcgcgcgggacgacggccggcacttctccgtggtcggcgtcacggtgcgcatcgacaaccgcgaggtgaccgggtggagtcagccgctgttgtatccgcggcaccggggcgtggtcgccttcctggtcaaggaaatcgacggagtggcgcacctgctggtgcacgcgcgctaccaggcggggctgctcgacgcgatggagatgggcccaacggtgcagtgcatcccggacaaccagcccggcccccgaccactgttcctggccgaggtgctggaagccgcccccgagcgtgtcctctacgacaccgtgctcaccgaggagggcgggcgattctaccggtcggagaaccgttacctcctggtcgacgccggcgacgacttcccgaccgaggtgccggacgagttctgctgggtgacggtgcgccagctggaggccctgctccggcacggctactacctcaacatcgaggcccgcagcttgctggcctgcctgcgcagcctgtggtga

SEQ ID NO: 45 - protein, 430 aa, Streptomyces mobaraensis
MRIMFTASNWAGHYMCMVPLAWALRGAGHEIRVACPPSQVRGVAAAGLMPVPVLDAPDMMESARLAFYVQAMYTPPQSGPRPLPLHPFTGEPMESLNDFDASDLRDFWQKSIDAVQRSYDNAVSFGDHWKPDLVVHDIMAVEGALVAALRGVPSVYVSPGFIGTVETEPGLDLVSADPLSCFEKYGVDWGRDRIRYAVDPSPDSAIPPLGDALRLPMRYVPYNGAQSADPWQLGPIRGKRVCVVWGNSASGIFGSDVPALRHAIDAAVAQGAEVVLTAPPEQVERLGSLPDGVRLLRNCPLELILPYCDLLIHHGSANCYMNGIVAGIPQLSLALNYDTLVCGRRVDPTGATVTLSGLEATAEKIDEALRGALFDHRYRLAAEKLRDGVERAPSPAAVAGLLERLVADGGLTAEDVAETVRNANEVRRVA

SEQ ID NO: 46 - DNA, 1293 bp, Streptomyces mobaraensis
atgaggattatgttcaccgcctcgaactgggcgggacattacatgtgcatggtgcccctggcctgggcgctgcgcggcgcggggcacgagatccgcgtggcgtgcccgccgtcgcaggtgcgcggggtcgccgcggccggcctgatgccggtcccggtgctggacgcgccggacatgatggagagcgcgcggctggcgttctacgtgcaggccatgtacacgccgccgcagtccggcccgcggccgctgccgctgcacccgttcaccggggagccgatggagtcgctcaacgacttcgacgcctccgacctgcgggacttctggcagaagtcgatcgacgcggtgcagcgcagctacgacaacgcggtgagcttcggcgaccactggaagcccgacctcgtggtgcacgacatcatggccgtcgagggcgccctggtcgccgccctccggggtgtgcccagcgtctacgtctcccccgggttcatcgggaccgtggagaccgagccgggcctcgacctggtctcggcggacccgctgtcgtgcttcgagaagtacggggtcgactggggccgcgaccggatccggtacgcggtggacccctcgccggactcggcgatcccgccgctcggcgacgcgctgcggctgcccatgcgctacgtgccgtacaacggcgcgcagtcggccgacccctggcagctgggcccgatccgcggcaagcgcgtctgcgtcgtctggggcaactcggcgtcgggcatcttcggctccgacgtccccgcgctgcggcacgccatcgacgcggcggtggcgcagggcgccgaggtggtgctcacggcgccgccggagcaggtggagcggctgggctcgctgcccgacggcgtccggctgctgcgcaactgcccgctggagctgatcctcccctactgcgacctgctcatccaccacggcagcgccaactgctacatgaacggcatcgtggcggggatcccccagctctccctcgccctcaactacgacacgctggtctgcggccgccgcgtcgaccccaccggcgccacggtgaccctctccggcctcgaggccaccgccgagaagatcgacgaggcgctgcgcggcgcgctgttcgaccaccgctaccgccttgcggcggagaagctccgggacggcgtcgagcgggcgccctcgcccgccgcggtcgccgggctgctggagcgcctggtggcggacggcgggctgacggcggaggacgtcgccgagaccgtcaggaacgccaacgaggttcggagggtcgcgtga

SEQ ID NO: 47 - protein, 438 aa, Micromonospora carbonacea aurantiaca
MRILFTVSNWAGHYMCMVPLAWAFRAAGHEVRVACPPQQVSGVQATGLMPVSMLDSADMMESARLAYWSLAINTPPQSGEMPLPLHPFTGEALGSVRDFDTGMLSDFWKRSIAAVQRSFDNAVDYAASWRPDLVVYDIMAVEGALVGILNDVPSVFFGPGFIGTVETEPGLNMMAGDPLSCFEKYGVQWTRRDIKYAVDPSPDVAIPPMGDALRIPIRYHPFNGSQDVDPWLLGPVKGKRVCVVWGNSATGVFGERLPALRQAVETAAQLATEVVLTAALSEVDAMGTLPPNVRVLRNCPLELILPDCDLLIHHGSANCLMNGIAMGVPQLSLALNFDGQIYGRRLDPQGATKTLPGLLIDRDAIDKAIGEVLFDHRYRRRAVELSESVGAAPTAAQVADLLVTLAREGELTASDVAGLVTGRGPQRKEITQDTVSEV

SEQ ID NO: 48 - DNA, 1317 bp, Micromonospora carbonacea aurantiaca
atgcggattctgtttaccgtgtccaactgggctggacactacatgtgcatggttccgctcgcatgggcgttccgggcggccgggcacgaggtccgggtcgcctgcccgccccagcaggtttcgggggtccaggcgaccggcctgatgccggtgtcgatgctcgactccgccgacatgatggaaagcgcccggctggcctactggtcgttggcgatcaacaccccgccgcagagcggggagatgcctctgccgctgcatcccttcaccggtgaggcgctcggctccgtgcgcgatttcgacaccggcatgctgagcgacttctggaagaggtccatcgccgcggtccagcgcagcttcgacaacgccgtcgactacgccgcgtcctggcgtcccgacctggtggtgtacgacatcatggcggtcgagggggcgctggtcggcattttgaacgacgtgcccagcgtcttcttcgggccgggcttcatcggcacggtggagaccgagccggggctcaacatgatggcgggggatcccctctcctgcttcgagaagtacggcgtgcagtggacccggcgcgacatcaagtacgccgtcgatccgtcgccggacgtggccattccgcccatgggcgacgcgctgcggatacccatccgataccaccccttcaacggatctcaggacgtcgacccctggctgttgggcccggtcaagggcaagcgggtgtgcgtggtgtggggcaactccgcgacgggggtgttcggcgagcggctgccggcccttcgacaggcggtcgagaccgcggcgcaactggccaccgaggtggtgctcacggcggcgctgtccgaggtggacgcgatgggcacgctgccaccgaacgtccgggtcctgcgcaactgcccactcgaactgatcctgcccgactgcgacctgctcatccaccacggcagcgcgaactgcctgatgaacggcatcgccatgggggtgccgcagctgtcactcgcgctgaacttcgacgggcagatctacggtcggcggctggatccgcagggagcgaccaagacgttgcccgggctgctgatcgaccgcgacgcgatcgacaaggccatcggtgaggtgctgttcgaccaccggtaccggcgccgggcggtcgagctcagcgagtccgtcggtgccgcgccgaccgccgcgcaggtcgccgacctgctcgtcaccctggcccgcgagggtgagctgaccgcctccgacgtcgccgggttggtgaccgggcgagggccgcaacgtaaggaaatcacccaggacaccgtgagcgaggtctga

SEQ ID NO: 49 - protein, 423 aa, Micromonospora carbonacea africana
MKVLFTVSNWAGHYMCMVPLAWALRAAGHDVKVACSPSQVRGVAAAGMMPVSVLDGPDMMESARLGFYVQALYTPQHMVEQPLPLNPFTGRPMDSLADFDTDLLADYWKRTVTAVQRSYDNAVDYAAHYRPDLVVHDIMAVEGALVAELHHIPSVYFSPGFIGTIETEPGLDLVSGDPVTEFRKYGVEWSRHQIRYAIDPSPDVAIPPMGDALRIPIRYQPYNGSQDVDPWLLGPRRGKRVCVVWGNSATGVFGAQVPALRHAVDAAAQRGVEVVITAASSEVEGLGALPPNVRVLSNCPLELILPDCDLLVHHGSANCYMNGLAMGVPQLSLALNYDALIYGRRLDPQGATKTLPGLKASREEVDEALGSVLYDHRFRVAAQRMRESVTTGPTAVQVAELLARLADTGALSPEDVAEFARRP

SEQ ID NO: 50 - DNA, 1272 bp, Micromonospora carbonacea africana
atgaaggttctgttcaccgtgtccaactgggccgggcactacatgtgcatggtgccgctggcctgggcgctgcgggcggccggccacgacgtcaaggtcgcctgttcgccgtcccaggtccggggcgtggccgcggcgggcatgatgcccgtctcggtgctcgacggacccgacatgatggagagcgcccggctgggcttctacgtccaggccctctacaccccgcagcacatggtggagcaaccgctgccgttgaaccccttcacgggccggccgatggactcgctcgccgacttcgacaccgacctgctcgccgactactggaagcgcacggtcaccgcggtccagcgcagctacgacaacgcggtcgactacgccgcccactaccggcccgacctggtggtccacgacatcatggccgtggagggcgcgctggtcgccgagctgcaccacatccccagcgtctacttctcgcccgggttcatcggcaccatcgagaccgagcccgggctcgacctggtctccggcgacccggtgaccgagttccgcaagtacggcgtcgagtggagccggcaccagatccggtacgccatcgacccgtcgcccgacgtggcgatcccgccgatgggcgacgcgctgcggatcccgatccgctaccagccctacaacggctcccaggacgtggacccctggctgctcggtccgcgccggggcaagcgggtctgcgtggtgtggggcaactccgccacgggcgtgttcggcgcgcaggtgccggcgctgcggcacgccgtcgacgccgccgcccagcggggcgtggaggtcgtgatcaccgccgcctcctccgaggtggaggggctgggcgcgctgccgccgaacgtgcgggtgctcagcaactgcccgctggagctcatcctccccgactgcgacttgctggtgcaccacggcagcgccaactgctacatgaacgggctcgccatgggcgtgccgcagttgtcgctggcgctcaactacgacgccctgatctacgggcggcggctcgacccgcagggcgcgacgaagacgctgcccggcctgaaggcgtcccgcgaggaggtcgacgaggccctcggctccgtcctctacgaccaccgattccgggtggcggcgcagcggatgcgggagtccgtcaccaccgggccgaccgccgtccaggtggccgaactcctggcccggctggccgacaccggcgcgctgagccccgaggacgtcgccgagttcgcccggcgtccgtga

SEQ ID NO: 51 - protein, 335 aa, Streptomyces mobaraensis
MDAERRPKVVTITVGTNELRWLDRCLGSLLDSDTTGIDLEVCYVDNDSADGSVEHVREKYPRATVIRNDRNLGFAGANNVGMRRALESGADYVFLVNPDTWTPPGLVRGLTEVAEEWPEYGILGPLQYRYDADSTALDEFNDWTHTVLWLGEQHAFAGDGIAHPSTAGPAEGRAPRTLEHAYVQGSALFARTAMLRETGLFDEVLHTYYEETDLCRRARWAGWRVALHLDLGIQHRGGGGAAVPSEYSRVHMRRNRYYYLLTDIDWHPAKAARLAGRWLVADLRGHSVVGRVPAATGARETAEALRWLAGRVPTMRSRRRSHRALRARGAKGASR

SEQ ID NO: 52 - DNA, 1008 bp, Streptomyces mobaraensis
atggacgccgagcgccggccgaaggtcgtgacgatcaccgtcgggaccaacgagctgcgctggctggaccggtgcctcggttccctgctggacagcgacaccaccggcatcgacctggaggtctgctacgtcgacaacgactcggcggacggcagcgtcgagcacgtgcgggagaagtacccccgggcgacggtcatccgcaacgaccgcaacctgggcttcgccggggcgaacaacgtcggcatgcgccgcgcgctggagtccggcgcggactacgtgttcctcgtgaaccccgacacctggaccccgcccggcctggtgcgcggcctcaccgaagtggccgaggagtggccggagtacggcatcctcggcccgctccagtaccgctacgacgccgactccacggcgctcgacgagttcaacgactggacgcacacggtcctgtggctgggcgagcagcacgccttcgccggcgacgggatcgcccacccctccaccgccggccccgccgagggccgggccccgcgcacgctggagcacgcctacgtccagggttcggcgctgttcgcccggaccgcgatgctccgcgagaccgggctcttcgacgaggtgctgcacacctactacgaggagaccgacctgtgccgccgggcccgctgggcgggctggcgggtggcgctccacctggacctgggcatccagcaccggggcggcggaggcgccgccgtccccagcgagtacagccgggtccacatgcggcgcaaccgctactactacctcctgacggacatcgactggcatccggcgaaggccgcccggctggccgggcgctggctggtggcggacctcaggggccacagcgtcgtcggccgcgtgccggccgcgacgggggcgcgggagacggccgaggcgctgcgctggctcgccggccgggtgccgaccatgcggtcccggcgccggagccaccgcgcgctgcgggcccggggcgcgaagggggcttcccgatga

SEQ ID NO: 53 - protein, 337 aa, Micromonospora carbonacea aurantiaca
MTSGRPRVATVTVTTNESKWLRRCLGALVDSDTEGFDLDVHLIDNASTDGSAELVAREFPSVKITRNPTNLGFAGANNVGIRAALAAGADYVFLVNPDTWTPPRLVRAMVEFAERWPEYGIVGPLQYRYDAESTELVEFNDWTNTALWLGEQHAFAGDGMAHPSPAGSPQGRAPRTLEHAYVQGAALFARVAMLREVGVFDEVFHTYYEEVDLCRRARWAGWRVALLLDEGLQHHGGGGAATRSAYTRVHMRRNRYYYLLTDVDWHPTKATRLAARWLVADLVGRTVVGRVDPMTGARETLAAVRWLAGHAPTIAERRRSHRALRAGRTPARREVAS

SEQ ID NO: 54 - DNA, 1014 bp, Micromonospora carbonacea aurantiaca
atgacatcgggacgcccgcgggtggcgaccgtcacggtgaccaccaacgagagcaagtggctgcgtcgctgcctgggggcgcttgtcgacagtgacaccgaaggattcgatcttgacgtgcacctgatcgacaacgcctccaccgacggcagcgcggagctggtcgcgcgggagttcccgagcgtgaagatcacccgtaatcccaccaacctcgggttcgccggcgccaacaacgtcggcatccgggccgcgctcgccgccggcgccgactacgtgttcctggtcaacccggacacctggaccccgccacggctcgtccgggcgatggtcgaattcgccgagcgttggccggagtacggcatcgtcggcccgctgcaataccgctacgacgccgagtcgaccgagctcgtcgagttcaacgactggaccaacacggcactctggctgggcgaacagcacgcgttcgcgggcgacgggatggctcatccctccccggccggcagcccgcaaggccgcgcgccgaggaccctggagcacgcgtacgtccagggcgcggcgctgttcgcgcgggtggcgatgctgcgcgaggtgggcgtgttcgatgaggtgttccacacgtactacgaggaggtggacctgtgccggcgggccagatgggcgggctggcgggtggccctcctgctcgacgagggcctgcaacaccacggcggcggcggtgcggccacgcgcagcgcgtacacccgggtgcacatgcggcgcaaccgttactactacctgctcacggacgtggactggcacccgaccaaggcgacccggctggccgcccggtggctggtggcggacctggtcggccggaccgtggtcggcagggtggacccgatgaccggggcccgggaaaccctggcggcggtgcgctggctggcgggccacgcgccgaccatagcggaacgtcgacgcagtcaccgggcgttgcgcgcgggccgtacgccggcacggcgtgaggtggcgtcgtga

SEQ ID NO: 55 - protein, 347 aa, Micromonospora carbonacea africana
MTREGSTPPVRVATITVGTNEIRWLDRALGSLLASDTTGFELTVFYVDNASADGSVAHVMSAFPGVRVIRNPRNLGFTGANNVGMRAALAEGFDHIFLVNPDTWTPPGLVRGLVEFAQRWPQYGVIGPLQYRYDPASTELTDFNDWTQVALYLGEQHTFAGDLLDHPSHVTATVRDRAPRTLEHAYVQGSALFVRAAVLREVGLLDEVFHTYYEEVDLCRRARWAGWRVALLLDLGIQHKGGGGTAASAYSRIHMRRNRYYYLLTDVDWPPAKAARLAARWLFSDVRGRGVTGRTSAGVGARETFVALGWLARQAPVIRERRRRHRLLRARGTGVDRARERKETVRG

SEQ ID NO: 56 - DNA, 1044 bp, Micromonospora carbonacea africana
atgacccgcgaggggtcaacgccgccggttagggtcgccaccatcacggtcggcaccaacgagatccgttggctggaccgcgcgctcggctcgctgctcgccagcgacacgaccggcttcgagctgacggtcttctacgtggacaacgcctcggccgacggcagcgtggcgcacgtcatgtcggcgtttcccggcgtccgggtcatccgaaacccccgcaatctcggcttcaccggcgcgaacaacgtcggcatgcgggcggccctggcggagggcttcgaccacatcttcctggtcaacccggacacctggacaccgccggggctggtccgcgggctggtcgagttcgcgcagcggtggccgcagtacggcgtcatcggcccgttgcagtaccgctacgacccggcgtcgaccgagttgaccgacttcaacgactggacgcaggtcgccctctacctgggcgagcagcacaccttcgccggcgacctgctggatcatccctcgcacgtcaccgcgacggtccgcgaccgcgcgccgcgcaccctggagcacgcgtacgtgcagggctcggcgctgttcgtccgggccgccgtgctacgcgaggtcggcctgctcgacgaggtgttccacacctactacgaggaggtcgacctgtgccggcgggcccggtgggcgggctggcgggtggcgctcctactcgacctcggcatccagcacaaaggcggcggtggcaccgccgcgagcgcgtacagccggatacacatgcgccgcaaccgctactactatctgctgaccgatgtggactggcccccggccaaggccgcccggctcgccgcccgctggctgttctccgacgtccgtgggcggggcgtgacgggtcggacgagcgcgggcgtcggggcgcgggagaccttcgtggcgctcgggtggctggcccgccaggccccggtgatccgggaacgtcgtcggcggcaccggctgctgcgggcacgagggacgggcgtggaccgcgcccgagagcggaaggaaaccgtgcggggatga

SEQ ID NO: 57 - protein, 294 aa, Streptomyces mobaraensis
VDKKETADRGTPGQRPMVVAVCAFRLENVRRHLRHNLDQLNGDEYLVLLDRPVTPEAEKVAAQVNEGGGTMRVLGATNGLSASRNTVLREYAGRHILFVDDDVRLDASAVDAVRAAFRAGAHVVGARLRPPHDIGRLPWFLSSGQYHLVGWHRARGPVKIWGACMGVDADFAHRRGLTFDLGLSRTGGNLQSGEDTTFIALMKEAGAVERLLPEHAVVHDIDPGRLTLRYLLRRAYWQGHSEARRHQSVAGLRKELDRHRTAPESRCTPLLFCLYGAATAIGVGHGLLLRLRGK

SEQ ID NO: 58 - DNA, 885 bp, Streptomyces mobaraensis
gtggacaagaaagagaccgcggaccggggcactcccgggcagcgtcccatggtggtggcggtctgtgccttccgtctggagaacgtgcgccggcatctgcggcacaacctcgaccagttgaacggcgacgaatacctggtcctgctggaccggccggtcaccccggaggccgagaaggtcgccgcccaggtgaacgagggcggcgggacgatgcgcgtcctcggcgccacgaacgggctgtcggcgtcccgcaacacggtgctgcgcgagtacgccgggcggcacatcctgttcgtcgacgacgacgtgcgcctcgacgcctccgccgtggacgccgtccgcgccgcgttccgcgccggggcgcacgtggtcggggcccggctgcgaccgccgcacgacatcggccggctgccctggttcctgtcctccggccagtaccacctcgtcggctggcaccgagcccgcggtcccgtcaagatctggggcgcctgcatgggcgtcgacgccgacttcgcccaccgccggggcctcaccttcgacctgggcctcagccgcacgggcggcaacctgcagtccggcgaggacaccaccttcatcgcgctgatgaaggaggcgggcgccgtggagcgcctgctgcccgagcacgcggtcgtccacgacatcgaccccggccggctgaccctccgctacctcctgcgcagggcctactggcaggggcactcggaggcgcggcgccaccagtccgtcgcgggtctccgcaaggagctggaccggcaccgcaccgcccccgagtcccgctgcacccccctgctgttctgcctgtacggcgccgccaccgcgatcggtgtcggccacggcctcctgctgcgcctgcgcggcaagtga

SEQ ID NO: 59 - protein, 295 aa, Micromonospora carbonacea aurantiaca
METKKKGPSDYPMVVAICAFSVENVRKHLHHNLAQLSGDEYFVQLDRPSTPEAESVAAEVDAAGGTMRVLGATGGLSASRNLMLARWPNHHVMFVDDDVRLDAKAVTAVRESLRAGTHVVGTRLARPPRPLPWYVTSGQFHLLGWHRDDREIKIWGACMAVDTAFAHAKGLDFDLALSRTGGNLQSGEDTTFVKLMKDAGAREQLLPDCSVTHDVDPARLTLRYLLRRAYWQGRCESRRGQAWAGFRKEWDRHRTAPESRLRLPLACLYGAVTAWGVLHDQLLLRWGRDHRSAAV

SEQ ID NO: 60 - DNA, 888 bp, Micromonospora carbonacea aurantiaca
atggaaacgaagaaaaaagggccctccgattatccgatggtagtggctatatgcgcattcagtgtcgagaatgtgcgtaagcacctacaccacaacctggcccaactgtccggtgacgagtacttcgtgcagttggaccggccgagcactccggaggcggagtcggtcgcggccgaggtggatgccgccggcggaacgatgcgcgttctcggcgccaccggcggcctgtccgcctcgcggaatctcatgttggcccggtggccgaatcaccacgtgatgttcgtcgacgacgacgtgcggctggacgccaaggccgtcacggcggtccgcgagagcctgcgcgcgggcacccacgtcgtcggcactcggctcgcccgtccaccacgccccctgccctggtacgtgacgtccggtcagttccacctgctcggctggcaccgggacgaccgcgagatcaagatctggggtgcctgtatggcggtggacaccgccttcgcccatgccaagggcctcgacttcgatctcgcgttgagccggacgggtggcaacctccagtccggcgaggacaccacgttcgtcaagctcatgaaggacgcgggggcccgggagcaactcctgccggactgctccgtgacccacgacgtggatcccgcccggctgaccctgcgctacctgctgcggcgggcgtactggcagggtcggtgcgagtcacggcgtggccaggcgtgggcggggttccggaaggaatgggaccggcatcgcaccgcgccggagtcccgcctgcgcctgccgctggcgtgtctctacggtgccgtgaccgcgtggggcgtccttcatgatcagctcctgctgaggtgggggcgtgatcatcgctcggcggcggtctga

SEQ ID NO: 61 - protein, 304 aa, Micromonospora carbonacea africana
MPNNASVVSRDPSDHPMVVAICAFRVENVRKHLAHNMAQLSGDEYYVLLDRPVTAEAEEVAEEVRAAGGTMRILGATNGLSASRNAMLARWPHHHLMFVDDDVRLDAAAVDAVRKSLRDGAHVVGTRLARPALRLPWYVTSGQFHLVGWHRDQGNIKIWGACMGVDSAFAHAHGLDFDLALSRTGGNLQSGEDTSFISAMKAAGAREQLLPDHAVTHDIDPGRLTPRYLLRRAYWQGRCEAGRNQARAGLRKEWDRHRTAPESRLALPLALGYTAATAAGLSHELLRRARLRRFPPPRRSPEPG

SEQ ID NO: 62 - DNA, 915 bp, Micromonospora carbonacea africana
atgccgaacaacgcctctgtggtcagccgcgatccgtccgaccacccgatggtggtggcgatctgcgcgttccgggtggagaacgtcaggaaacacctcgcgcacaacatggcccagctctccggcgacgagtactacgtcctgctggaccggcccgtcacggccgaggcggaggaggtcgccgaggaggtccgggccgccggcggcaccatgcgcatcctcggtgccaccaatggcctgtcggcctcccgcaacgcgatgctcgcccgctggccgcaccaccatctgatgttcgtcgacgacgacgtgcggctcgacgccgctgccgtcgacgccgtccgcaagagcctgcgcgacggcgcgcacgtggtcggcacccggctggcccgccccgcgctgcgtctgccgtggtacgtcacctccggccagttccacctggtcggctggcaccgtgaccagggaaacatcaagatctggggcgcgtgcatgggggtggactccgcgttcgcgcacgcccacgggttggatttcgacctggccctcagccgtaccgggggcaacctccagtcaggggaggacacctccttcatcagcgccatgaaggccgccggcgcccgcgagcaactgctcccggaccacgcggtcacccatgacatcgacccgggccggctgaccccccggtacctgctgcggcgggcgtactggcaggggcggtgcgaggccggacggaaccaggcacgggccggcctgcgcaaggaatgggaccggcaccgtacggccccggaatcccggctcgccctgccactggccctcggctacaccgcggcgaccgccgccgggttgagccacgaactgctgcgaagggcgcggttgcggcggttcccgcccccgagacgctctcccgagccgggctga

SEQ ID NO: 63 - protein, 342 aa, Streptomyces mobaraensis
MRPLKVALVNIPLRVPGSDEWITVPPQGYGGIQWVVANLMDGLLELGHEVFLLGAPGSPAGAPGLTVVPVGEPEEIQRWLRESDVDVVHDHSGGLIGPAGLRPGTAFISSHHFTTRAVNPAGCTYSSRAQRAHCGGGDDAPVIPIPVDPARYRSAADAVPKEDFLLFMGRISPHKGALEAAAFAAASGRRLVLAGPAWEPDYFAEITSRYGSTVEVIGEVGAERRLDLLASAHAVLAMSQAVEGPWGGIWCEPGATVVSEAAVSGTPVVGTRNGCLAEIVPSVGEVVAYGTDFTPEEARRVLDGLPSPDEVRREAVRLWGHVEIAGRYVEQYRRLLSGVTWK

SEQ ID NO: 64 - DNA, 1029 bp, Streptomyces mobaraensis
atgaggccgttgaaggtcgcgctggtcaacatcccgctccgggtcccggggagcgacgagtggatcaccgtgccgccgcaggggtacggcgggatccagtgggtcgtcgccaacctgatggacgggctgctcgaactcggccacgaggtcttcctgctgggcgccccgggcagcccggcgggggccccgggactgaccgtcgtgccggtcggcgagccggaggagatccagcggtggctgcgggagtcggacgtcgacgtggtccacgaccacagcggcggcctgatcggcccggccgggctgcgtcccggcaccgcgttcatcagctcgcaccacttcaccacccgggcggtcaacccagcgggctgcacctacagttcccgggcgcagcgcgcgcactgcgggggcggcgacgacgcgcccgtcatcccgatccccgtcgacccggcccgctaccggtcggccgcggacgcggtgcccaaggaggacttcctgctcttcatgggccggatctcgccgcacaagggggcgctggaggccgccgcgttcgcggcggcgagcggccggcgcctggtgctggccgggccggcctgggagcccgactacttcgcggagatcacctcccggtacggctcgaccgtcgaggtgatcggggaggtgggcgccgaacggcggctcgacctgctcgcctccgcgcacgcggtgctcgccatgtcccaggcggtcgaggggccgtggggcggcatctggtgcgaaccgggcgccacggtggtctccgaggccgcggtgagcggcacccccgtcgtgggcacgcgcaacggctgcctggcggagatcgtgccgtcggtcggcgaggtcgtggcctacgggacggacttcacgcccgaggaggcccgccgggtgctggacgggctgccgtcgcccgacgaggtccggcgcgaggcggtccggctgtggggccacgtggagatcgccggacggtatgtggagcagtaccgcaggctgctctccggggtgacctggaagtga

SEQ ID NO: 65 - protein, 339 aa, Micromonospora carbonacea aurantiaca
MRVVLVTMALRVPTDPSHWITVPPQGYAGIHWIVANHMDGLLELGHEVFLLGAPGTTPVAPAVTVVDAGEIEDMHAWLNGPEAATIDVVHDFSCGQIDPDRLPRGMAYLSTHHLTGKPKYPRNCVYASYAQRAQAENDVAPVVRISVNQARYPFRADKDDYLLYLGRISEWKGTYEAAAFASAAGRRLVVAGPSWEEDYLARILRDFGDSVDLVGEVGGDRRLDLISRATAMMVLSQSTMGPWGVVWCEPGSTVVSEAAACGTPVIGTPNGCLAEIVPAVGTVVPEGADFTVEQARSVVAALPGPDAVRAAALERWDHVVVAKEFEAIYHDVLAGRTWT

SEQ ID NO: 66 - DNA, 1020 bp, Micromonospora carbonacea aurantiaca
atgcgtgtcgtgttggtgacgatggcactgcgggtgccgacggatccgagccactggatcacggtcccgccgcagggctatgccggcatccactggatcgtggcgaaccacatggacggcctgctcgaactcggccacgaggtgttcctgctcggcgcgccgggcacgacgccggtcgcaccggcggtcaccgtggtggacgcgggcgagatcgaggacatgcacgcctggctgaacggccctgaggcggccacgatcgacgtcgtccacgacttctcctgcgggcagatcgatcccgaccggcttccccggggcatggcgtacctgtccacccaccacctgaccggcaagccgaagtatccgcgcaactgtgtgtacgcctcgtatgcccaacgggcccaggcggagaacgacgtcgcgccggtggtccgcatctcggtgaaccaggcgcgctacccgttccgggccgacaaggacgactacctgctctacctcggtcggatctcggaatggaagggcacctacgaggcggccgccttcgccagcgccgccgggcgtcgcctcgtcgtggcgggcccgtcctgggaagaggactacctggcccggatcctgcgcgacttcggggacagcgtcgaccttgtcggcgaggtggggggcgaccggcggctcgacctgatctcccgcgcgaccgcgatgatggtcctgtcgcagagcaccatggggccgtggggcgtggtgtggtgtgagcccggatcgaccgtggtgtcggaggccgcggcgtgcgggacgcccgtcatcggcacgccgaacggatgcctggccgagatcgtgcccgcggtcggaacggtcgtgcccgagggcgcggacttcaccgtcgaacaggcccggagcgtcgtggcggcgctgcccgggccggacgcggtccgggcggcggcgctggagcggtgggaccacgtcgtggtggccaaggagttcgaggccatctaccacgacgtgctcgccggtcgtacctggacgtga

SEQ ID NO: 67 - protein, 340 aa, Micromonospora carbonacea africana
MTPLRIAMVNIPFRLPSDERQWITVPPQGYGGIQWIVANKIKGLLELGHEVFLLGAPGSPRTHPRLTVVPAGEPEDIRAWLKSAPVDVVNDYSCGKVDPIELPPGVGLVASHHMTTRPSYPAGCVYASKAQREQCGGGADAPVIPIGVDPSLYRPGDRKDDFLLFMGRISPFKGALEAAAFARAAGRRLLMAGPAWEPEYLDRIMGEYGDHVTLVGEVGGQERMDLLATAAAILVLSQPVPGPWGGTWCEPGATVVSEAAASGTPVVGTSNGCLAEIVPAVGEVVGFGTGFDEREARAVLSRLPSPAQARKAAIRCWGHVEIARRYEAVYRDVLAGARWS

SEQ ID NO: 68 - DNA, 1023 bp, Micromonospora carbonacea africana
atgacccccctgcggatcgcgatggtcaacataccgttccggttgccgagcgacgagcggcagtggatcacggtcccgccgcaggggtacggcgggatccagtggatcgtggccaacaagatcaagggcctgctcgaactcgggcacgaggtgttcctgctcggtgccccgggcagtccgcgtacgcatccacgcctgaccgtggtgccggcgggcgagcccgaggacatccgggcatggttgaagtccgctccggtggacgtcgtcaacgactacagctgcggcaaggtggatccgatcgagctgcccccgggggtcggcctggtggcctcgcaccacatgaccacccgcccgtcctatccggccggctgcgtgtacgcctcgaaggcgcagcgggagcagtgcggcggcggcgcggacgccccggtcatcccgatcggggtggatccgtcgctctaccgccccggcgaccgcaaggacgacttcctgctcttcatgggccggatctccccgttcaagggcgcgctggaggcggccgcgttcgcccgggccgccggccgccggctactgatggccggtccggcctgggagccggagtacctcgaccggatcatgggcgagtacggcgaccacgtcaccctcgtcggcgaggtggggggtcaggaacgtatggacctgctcgccacggcggctgccatcctggtgctctcccagccggtgcccggcccgtggggcggcacgtggtgcgagccgggtgcgaccgtggtgtccgaggcggcggccagcggcaccccggtggtcggcacgagcaacggctgcctggcggagatcgtgccggccgtcggcgaggtggtgggcttcggcaccggcttcgacgagcgggaggcccgagcggtgctgtcccgactgccgtcgcccgcccaggcgcggaaggccgcgatccggtgctgggggcacgtggagatcgcccggcgctacgaggcggtgtaccgcgacgtgctggccggcgcgcgctggtcctga

SEQ ID NO: 69 - protein, 283 aa, Streptomyces mobaraensis
MGTRVLTEEQVEGFVSDGFVHLPGAFPGELAEEARALLWRQLDMDPDDPGTWTREVVRLGVRDDDVFVRAANTPLLHAAYDQLAGEGRWQPLTQVGTFPVRFPVTKRPEETEDYGWHIDASFLAEGADADRDWSGELDVIPPDYDKIFRYNVWSRGRALLLLLLFSDTGEEDAPTLIRVGSHLDVPPLLAPYGAEGTYLEAGEVGRDRPLRSATGKAGDAYLCHPFLVHTPVANTGVRPRFMAQPNLLPVGQLELDRPDGRYTPVERAVRRGLGEDAPRRESR

SEQ ID NO: 70 - DNA, 852 bp, Streptomyces mobaraensis
atgggaacccgcgtactgaccgaggagcaggtcgagggcttcgtctccgacggcttcgtccacctgccgggtgcgttcccgggggagctcgccgaggaggcgcgcgccctgctgtggcggcagctggacatggacccggacgacccgggcacctggacgcgggaggtggtccggctcggggtgcgcgacgacgacgtgttcgtccgtgccgccaacaccccgctgctgcacgccgcctacgaccagctcgccggggagggccgctggcagccgctgacccaggtcggcacgttcccggtgcggttccccgtgacgaagcggccggaggagaccgaggactacggctggcacatcgacgccagcttcctcgccgagggcgccgacgccgaccgcgactggtccggcgagctcgacgtgatcccgccggactacgacaagatcttccggtacaacgtgtggtcccgcggccgggcgctgctgctcctgctgctgttctccgacaccggcgaggaggacgcgcccacgctgatccgcgtcggctcccacctggacgtaccgccgctgctggcaccgtacggcgccgagggcacctacctggaggccggggaggtgggacgggaccggccgctgaggtccgcgacgggcaaggccggggacgcctacctctgccaccccttcctggtgcacacgccggtcgccaacaccggcgtccgcccgcgcttcatggcccagccgaacctgctgcccgtggggcagctcgaactcgaccggcccgacggccggtacacccccgtcgagcgggccgtgcgccggggcctcggcgaggacgccccccgacgagagagccggtga

SEQ ID NO: 71 - protein, 276 aa, Micromonospora carbonacea aurantiaca
MLTAEQIESFVADGFVRVPNAFPAALAAECRNLLWKQLDVDPDDSSTWTREVVRLGLRGDDAFVQSANTPALVEAYDQLVGAGRWRPLDMVGTFPIRFPVDRDPEQAEDYGWHIDASFLSPEGVAAMSSGQDWEGELPLVPPDYDRIFRSNLVSRGRALLVLLLYSDTGERDAPTLIRVGSHLDVPPLLAPYGAEGTYLACRDVGADRPLAMATGRAGDAYLCHPFLVHTPITNTGTSPRFMAQPSLQPTGEFDLDRADGQYVPVERAIRAGLARG

SEQ ID NO: 72 - DNA, 831 bp, Micromonospora carbonacea aurantiaca
atgctgacagccgagcagatcgagagcttcgtcgccgacggcttcgtccgggtgccgaacgctttccccgccgcgctcgccgccgagtgccgcaatctgctctggaagcaactcgacgtggatcccgacgacagctcgacctggaccagggaggtcgtccggctcggtctgcggggcgacgacgcgttcgtgcagagcgccaacaccccggcgttggtcgaggcgtacgaccagctcgtcggtgcgggccggtggcgaccgctggacatggtcgggacgttcccgatccgtttcccggtggaccgggatccggaacaggccgaggactacggctggcacatcgacgccagcttcctcagccccgagggcgtggccgccatgagcagcggccaggactgggagggcgagctcccgctcgtgccgccggactacgaccggatcttccgcagcaacctggtttcgcgtggccgggccctgctggtgctgctcctctactccgacaccggcgagcgtgacgcgcccacgctgatccgggtcggttcgcacctggacgtgccgcccctgctggcgccctacggcgccgaggggacctacctcgcctgccgcgacgtgggcgcggaccgccccctcgcgatggccaccgggcgggcgggcgacgcctacctctgccatccgttcctggtgcacacgccgatcaccaacaccggcaccagcccccggttcatggcccagccctcgctgcaaccgaccggcgagttcgacctggaccgcgccgacgggcagtacgtcccggtcgagcgggcgatccgggcgggactcgcccgtggatag

SEQ ID NO: 73 - protein, 284 aa, Micromonospora carbonacea africana
MSAQVLSDEQVERFVSDGFVKLEAAFPAELAQQGRELLWRQLGMDPEDRSTWSREVVRLGLQDAEPFVRSATTPRLHAAFDQLVGVGRWKPLDRIGTFPVRFPVPKRPEQTEDYGWHIDASFLADDAQRLGPQNWEGELDLVPPNYAEVFRCNLRSRGRALLLLFLFSDTDEREAPTLVRVGSHLDVPPLLEPYGPEGTYLDVGDVGRDRPLASATGRAGDVYLCHPFLVHTPVANTGTRPRFMAQPSLQPVGELDLDRPDGDYSPVERAVRIGLGLPAAEPVR

SEQ ID NO: 74 - DNA, 855 bp, Micromonospora carbonacea africana
atgagcgcccaggtcctcagcgacgagcaggtcgagcggttcgtctccgacgggttcgtgaagttggaggcggcgttcccggccgagctcgcgcagcagggtcgcgaactgctgtggcggcaactcggcatggaccccgaggaccggagcacctggtcccgcgaggtggtccggctgggcctccaggacgccgagcccttcgtgcgcagcgccaccacgccccggctgcacgccgccttcgaccagctcgtcggggtggggcgctggaagccgttggaccggatcggcaccttcccggtccggttcccggtgcccaagcgcccggagcagaccgaggactacggctggcacatcgacgccagtttcctggccgacgacgcgcagcggctgggcccccagaactgggagggcgagctggacctggtcccgcccaactacgcggaggtcttccgctgcaacctccggtcgcgggggcgggccctgctgctgctgttcctcttctccgacaccgacgagcgggaggcgccgacgctggtcagggtcggctcccacctggacgtgccgccgctgctcgaaccgtacggcccggagggcacctacctcgacgtgggcgacgtcggccgggaccgcccgctcgcctccgccaccggacgcgccggtgacgtctacctgtgccacccgttcctggtgcacaccccggtggccaacaccggcacgcggccccggttcatggcccagccgagcctgcagccggtgggcgagctggacctggaccgcccggacggcgactactcgccggtcgaacgggccgtgcgcatcgggctgggcctgccggccgccgagccggtccgatga

SEQ ID NO: 75 - protein, 485 aa, Streptomyces mobaraensis
MPKTVLVIGGGPAGSTAASLLSKAGMSVKLLERETFPRYHIGESIASSCRTIVDLVGALDEVDSRGYTVKNGVLLRWGKEDWAIDWPKIFGPDVRSWQVDRDDFDHVLLKNAVKQGADVTEGVTVKRVLFDGDRAVGAEWTDPDSGELVSEEFDYVIDASGRTGVISRHLKNRQPHEIFRNVAIWGYWQGGSLLPTSPTGGINVIGAPDGWYWVIPLRGDRYSVGFVCHQDRFLERRKEHDDLEAMLASLVQENPTVRDLMAEGEYQPGVRVEQDFSYVADSFHGPGYYLAGDAACFLDPLLSTGVHLALYSGMLAATSVLATVNEDVTEKEAGAFYESLYRNAYQRLFTLVSGVYQQQAGKAAYFGLADAMVPERATEEYEQVDGAVAFAELVAGLADIHDAVTGTHEDHAHQAHTQAVALPEDNSVRQLLAAAENARLMAEAGTPSAPVSEAPGKMDAHDLYDPATGLYLRTTPTLGIGRSRA

SEQ ID NO: 76 - DNA, 1458 bp, Streptomyces mobaraensis
atgcccaaaacagtgctcgtaatcggtggtgggccggcagggtccactgcggcctccttgctcagcaaggccggaatgtccgtcaagctgctggagcgggagactttcccgcggtaccacatcggcgagtcgatcgcctcttcctgccgcaccatcgtcgatctcgtcggcgcgctggacgaggtcgactcccgcggttacacggtcaagaacggtgtgctgctgcgctggggcaaggaggactgggccatcgactggccgaagatcttcggcccggacgtgcggtcctggcaggtcgaccgcgacgacttcgaccacgtgctcctgaagaacgcggtcaagcagggcgccgacgtcaccgagggcgtcacggtcaagcgcgtgctgttcgacggcgaccgcgcggtcggggccgagtggacggacccggactccggtgagctggtcagcgaggagttcgactacgtcatcgacgcctccggccgtacgggcgtcatctcccggcacctgaagaaccgccagccgcacgagatcttccgcaacgtcgcgatctggggctactggcagggcggttccctgctgcccacctcgcccaccggcggcatcaacgtcatcggcgcccccgacggctggtactgggtgatcccgctgcgcggcgaccggtacagcgtcggcttcgtctgccaccaggaccgcttcctggagcgccgcaaggagcacgacgacctggaggcgatgctcgcctcgctggtccaggagaacccgaccgtccgcgacctcatggcggagggcgagtaccagccgggcgtccgggtggagcaggacttctcctacgtcgccgacagcttccacggccccggctactacctcgccggcgacgccgcctgcttcctcgacccgctgctgtccaccggcgtccacctggcgctctacagcggcatgctggccgcgacgtccgtgctcgccacggtgaacgaggacgtcacggagaaggaggccggcgccttctacgagtcgctctaccgcaacgcctaccagcggctgttcaccctggtgtccggtgtgtaccagcagcaggccggcaaggccgcctacttcggcctggccgacgcgatggtcccggagcgcgccacggaggagtacgagcaggtggacggcgcggtggccttcgccgagctggtcgcggggctcgccgacatccacgacgccgtcaccgggacgcacgaggaccacgcccaccaggcgcacactcaggccgtcgccctgccggaggacaactccgtccgccagctgctcgccgcggccgagaacgcccgcctgatggcggaggccggcacgccgagcgcgccggtcagcgaggcccccggcaagatggacgcccacgacctctacgaccccgccacgggcctgtacctgcggaccaccccgaccctggggatcggccggtccagggcctga

SEQ ID NO: 77 - protein, 481 aa, Micromonospora carbonacea aurantiaca
MVSTVLVIGGGPAGSTAAALLARAGLSVTLLEKETFPRYHIGESIASSCRTIVDFVGALSDVDARGYTQKNGVLLRWGKEDWAIDWTEIFGPGVRSWQVDRDDFDHVLLNNAAKQGATVIQNAEVKRVIFDGDRAVAAEWAEPDSGERRTTEFDFVVDASGRAGMIPARHFKHRRANDTFKNVAIWGYWDGGSLLPNSPQGGINVIGAPDGWYWVIPLRGNRYSVGFVCHQKRFLERRSEHGSLEDMLAALVEESPTVRSLVATGTYQPGVRVEQDFSYVSDSFCGPGYFAAGDSACFLDPLLSTGVHLALYSGMLASASILGIVNGDVEEEQAYGFYETLYRNAFERLFTLVAAVYQQQAGKANYFALADRLIGEHDEAEFERVDGAKAFAQLIAGLADVSDAMAGRSVPPQLPAADAGNSVGQLFLAAEQARRMAEAGVPKAPVSEGLNKIDGLELFDPETGLYLMTSPRLGIGRTRPA

SEQ ID NO: 78 - DNA, 1446 bp, Micromonospora carbonacea aurantiaca
atggtcagcacggtcttggttatcggtggcggtccggccggatcgaccgccgcggcactgctcgcgcgtgcgggactgtcggtgaccttgctggagaaggagaccttcccgcgctaccacatcggcgagtcgatcgcgtcctcgtgccggaccatcgtcgacttcgtcggcgcgctgagcgacgtcgacgcccgcggctacacccagaagaacggtgtgctgctgcggtggggcaaggaggactgggccatcgactggaccgagatcttcggtcccggagtcaggtcctggcaggtggaccgcgacgacttcgaccacgtgctgctgaacaacgccgccaaacagggcgcgacggttatccagaacgccgaggtcaagcgggtgatcttcgacggcgaccgcgcggtggccgcggagtgggccgagccggacagcggcgagcggcgcaccaccgagttcgacttcgtcgtggacgcctccggccgtgccggcatgatccccgcccgccacttcaagcaccggcgggcgaacgacacgttcaagaacgtcgccatctggggctactgggacggcggatcactgctgcccaactcgccgcagggtggcatcaacgtgatcggcgcgccggacggctggtactgggtcatcccgctgcggggcaaccgctacagcgtcgggttcgtgtgtcaccagaagcgcttcctcgaacgccgcagcgaacacggctcactcgaggacatgctcgccgcgctcgtcgaggagtcgccgacggtgcggagcctggtggcgaccgggacgtaccagccgggtgtccgggtcgagcaggacttctcgtacgtgtccgacagcttctgcggccccggctacttcgccgcgggcgacagcgcctgcttcctggacccgctgctgtcgaccggcgtgcacctcgcgctctacagcggcatgctcgcgtcggcgtcgatcctgggcatcgtcaacggcgacgtcgaggaggagcaggcctacgggttctacgagacgctctaccgcaacgccttcgagcgcctgttcaccctggtcgcggccgtctaccagcagcaggccggcaaggcgaactacttcgccctcgccgaccggctgatcggcgagcacgacgaggccgagttcgaacgggtcgacggcgccaaggcgttcgcccagctgatcgccgggctcgccgacgtgagcgacgccatggccggtcgctcggttccgccgcagctaccggcggccgacgccggcaactcggtcggccagctcttcctcgccgccgagcaggcccgccggatggcggaggccggtgtccccaaagcgccggtcagcgaggggctgaacaagatcgacgggctcgagctgttcgacccggagaccggcctgtacctgatgacgagcccgcgactgggcatcggacggacccggccggcgtga

SEQ ID NO: 79 - protein, 492 aa, Micromonospora carbonacea africana
MSSKILVIGGGPAGSTAAALLARSGLSVTLLEKETFPRYHIGESIASSCRTIVDFVGALDEVDSRGYPQKNGVLLRWGNEDWAIDWAKIFGPGVRSWQVDRDDFDHVLLNNAGKQGAKIIQGAAVKRVLFDGERATAAEWFDPESGEVRTIDFDYVVDASGRAGLIPSQHFKHRRPTETFKNVAIWGYWQGGSLLPNSPSGGINVISAPDGWYWVIPLRGDRYSIGFVCHQSRFLERRKEHASLEDMLAALVQESPTVRGLTANGTYQPGVRVEQDFSYISDSFCGPGYFAAGDSACFLDPLLSTGVHLALYSGMLASASILATIHGDVTEEEARAFYESLYRNAYQRLFTLVAGVYQQQAGKRAYFGLADALVHDSGEPEYEKVDGARAFAQLVAGLADLDDAAEGRHDSTAAAAPAEQDNSVRQLFLAAEEARRMADARTPSAPVSEAPGKLDSHDLFDSATGLYLVTTPRLGIRRAKPADTQAAAEQSA

SEQ ID NO: 80 - DNA, 1479 bp, Micromonospora carbonacea africana
atgtccagcaagatcctagtcatcggtggaggtccggccggatccacggccgccgcgctgctcgcccgatcggggctgtcggtgacgctcctggaaaaggagacgttcccgcgataccacatcggcgagtcgatcgcgtcctcgtgccgcaccatcgtcgatttcgtgggcgctctcgacgaggtcgactcgcggggctacccgcagaagaacggggtcctgctgcgctggggcaacgaggactgggccatcgactgggccaagatcttcggtccgggcgtgcggtcctggcaggtcgaccgggacgacttcgaccacgtcctgctcaacaacgccggcaagcagggcgccaagatcatccagggcgcggctgtcaagcgggtgttgttcgacggtgagcgggccaccgccgccgagtggttcgaccccgagtcgggtgaggtccgcaccatcgatttcgactacgtggtcgacgcgtccggccgggccgggctgatcccgtcccagcacttcaagcaccggcgccccaccgagacgttcaagaacgtggccatctggggctactggcagggtggctcgctgctgccgaactctccctccggcgggatcaacgtcatctccgcgcccgacggctggtactgggtcattccgctgcgcggcgaccggtacagcatcggcttcgtctgccaccagagccgcttcctggagcggcgcaaggagcacgcctcgctggaggacatgctcgccgcactggtacaggagtccccgaccgtgcgcggcctgacggcgaacgggacgtaccagccgggcgtgcgggtggagcaggacttctcgtacatctccgacagcttctgcgggcccggctacttcgcggccggcgactccgcctgcttcctggacccactgctgtccaccggcgtgcacctcgccctctacagcggcatgctcgcctcggcgtccatcctggccaccatccacggtgacgtcaccgaggaggaggcgcgggcgttctacgagtccctctaccgcaacgcctaccagcgcctgttcaccctcgtcgccggcgtctaccagcagcaggccggcaagagggcatacttcggcctggccgacgcgctggtgcacgacagcggcgaacccgagtacgagaaggtagacggggcccgcgccttcgcccagctcgtcgccggcctcgccgacctggacgacgcggcggagggacggcacgacagcaccgcggcggcggcaccggcggagcaggacaactccgtccggcagctcttcctggccgccgaggaggcccgccggatggccgacgcgcgcacgccgagcgccccggtcagcgaggcgccgggcaagctcgacagccacgacctcttcgactcggcaaccggcctctacctggtcaccaccccgcgactggggatccgccgggccaagccggccgacacgcaggcggcggcagagcagtctgcctga

SEQ ID NO: 81 - protein, 344 aa, Streptomyces mobaraensis
VQIADLYIGALGVFVPPVVSVEWAVERGLYPAEEAEAHELGGVAVAGDIPPPEMALRAAQQAVKRWGGSPKEFDLLLYASTWHQGPDGWPPQAYLQRHLVGGDMLALEIRQGCNGVFSALELAAAYLRADPDRTSALIVAADNYGTPLVDRWRMGPGFIGGDAASALVLTKRPGFARLCSLASKGLPEIESLHRGDEPLFPPSITRGRPTDFSARIGQQFATRSPASLAMADIQDHMTEIAERALAGAGIGMADVARVSFMNYSREVVEQRCMAAWGLPLSRSTWEFGRGIGHCGASDHLLSMEHLVRTGELAPGDHVLQLATAPGLVVSSAVLQVLESPDWDA

SEQ ID NO: 82 - DNA, 1035 bp, Streptomyces mobaraensis
gtgcagatagccgacctgtacatcggtgctctcggcgtattcgtaccgcccgtggtgagcgtcgaatgggccgtggaacgcggcctctatccggccgaggaagccgaggcgcacgaactcggcggggtcgccgtcgccggcgacatcccccctccggaaatggccttgcgggcggcgcagcaggcggtgaaacggtggggcggatcgccgaaggaattcgatctgctgctgtacgcgagcacctggcaccagggccccgacggctggccgccgcaggcgtacctgcagcggcacctggtgggcggggacatgctcgccctggagatccggcagggctgcaacggcgtcttcagcgcgctggaactcgccgccgcctacctgcgggccgatccggaccgcacgagcgcgctgatcgtcgccgccgacaactacggcacgccgctggtcgaccggtggcggatgggtcccggcttcatcggcggcgacgccgcgtcggccctggtgctgaccaagcggcccggcttcgcccggctgtgctcgctggcgtccaagggcctgccggagatcgagtcgctgcaccggggcgacgagccgctgttcccgccgagcatcacccggggccgtccgaccgacttcagcgcccgcatcggccagcagttcgccacccggagccccgcctccctcgcgatggccgacatccaggaccacatgaccgagatcgccgagcgcgccctggcgggggccggcatcggcatggcggacgtcgcccgcgtctccttcatgaactactcccgggaagtggtcgaacagcgctgcatggcggcctgggggctgccgctgtcccgttcgacctgggagttcggccgcggcatcggccactgcggggccagcgaccacctgctctccatggaacacctcgtacggaccggtgagctcgcccccggcgaccacgtcctgcaactcgccaccgctcccggcctcgtggtgtccagcgccgtccttcaggttctcgaatcgccggactgggacgcatga

SEQ ID NO: 83 - protein, 344 aa, Micromonospora carbonacea aurantiaca
MRTPDMFIGGVGTFIPPRVSVDWAVARGLYSAEDAEAHELVGVAVAGDMPPPEMALRAAQQAVKRWGGSPKEFDLLLYASTWHQGPDGWPPQSYLQRHLVGGDLLALEIRQGCNGLFSAMELAASYLTAVPERTSALLVAADNYGTPLIDRWSMGPGFIGGDAASAIVLTKQPGFARLRSVCTRTMTTAEALHRGDEPLFPPSITVGRTTDFSARIGQQFASRSPAAAAMADVPQRVVELVDQALAEAEIGIGDIARVGFMNYSREVVEQRVMTMWDLPMSRSTWEYGRGIGHCGASDTILSFDHLVRTGELRPGDHMLMLGTAPGVVLSCVIVQVLESPAWTK

SEQ ID NO: 84 - DNA, 1035 bp, Micromonospora carbonacea aurantiaca
atgcggacaccggacatgttcatcggcggtgtcgggacgttcattccgccgcgggtgagcgtcgactgggcggtcgcccggggcctctattcggccgaggacgccgaggcgcacgaactcgtcggcgtcgcggtcgcgggcgacatgcctccccccgagatggcactccgggccgcacagcaggcggtcaagcggtggggcgggtcgccgaaggagttcgacctgctgctgtacgccagcacgtggcaccagggaccggacggctggccgccgcagtcgtacctgcaacggcatctggtgggcggcgacctgctcgccctggagatccggcagggctgcaacggtctgttcagcgcgatggaactcgccgccagctacctgaccgccgttccggaacgcacgagcgccctgctcgtcgcggcggacaactacggcacgccgctgatcgaccgctggtcgatgggacccggcttcatcggtggcgacgccgcctcggccatcgtgctgaccaaacaaccggggttcgcccggctgcgttcggtgtgcacacggacgatgacgaccgccgaagccctgcaccgcggcgacgagccgctgttcccgcccagcatcacggtcggccgcaccacggacttcagcgcccggatcggccagcagttcgccagccgcagcccggcggccgcagccatggccgacgtgccgcagcgggtcgtcgagctggtcgaccaggcgctggcggaggccgagatcgggatcggcgacatcgcccgggtggggttcatgaactactcccgcgaggtggtcgagcagcgggtgatgacgatgtgggacctgccgatgtcgcgttcgacctgggagtacggtcgcgggatcgggcactgcggcgccagcgacaccatcctgtccttcgatcacctggtgcgcacgggggagctccggccgggcgaccacatgttgatgctgggcaccgcacccggcgtcgtgctgtcctgtgtcatcgtccaggtcctcgaatcgccggcctggacgaagtga

SEQ ID NO: 85 - protein, 344 aa, Micromonospora carbonacea africana
VRTPDLFIGAVGAFVPPTVSVEWAIDRGLYSREQVELHELAGTAIAGDLPAPEMALRAAQQAVKRWGGSPTEFDLLLYASTWHQGPDGWPPHSYLQRHLVGGDLLALEIRQGCNGMFSAFELAASHLQAVPERTSALLVAADNYGTPMVDRWRMGPGFIGGDAGSALILTKRPGFARLRSVCTKSVPEAERLHRGDEPLFPPSVLTGRELNFTARIDQQFAARSPASIAMADVGDHIEEVVGRALAEAEIEVGDLARVAFMNFSREIMEQRCLANWGLPMSRSTFDFGRRIGHCGASDPLLALEHLARTGGLGPGDHLLTLGTAPGVVVSCAIVQVIESPTWRE

SEQ ID NO: 86 - DNA, 1035 bp, Micromonospora carbonacea africana
gtgcgtacaccggatctgttcatcggcgccgtcggcgccttcgtcccgccgacggtgagcgtcgagtgggcgatcgaccgcggtctttactcccgcgagcaggtggagctgcacgagctggcgggcacggccatcgccggcgacctgcccgcgccggagatggcgctgcgcgccgcccaacaggcggtcaagcgctggggcggctcgccgacggagttcgacctgctgctctacgccagcacctggcaccaggggcccgacggctggccgccgcactcctatctccagcggcacctggtcggcggcgacctgctggcgttggagatccggcagggctgcaacgggatgttcagcgcgttcgagctggccgccagccacctccaggcggtacccgagcgcaccagcgccctgctggtcgccgccgacaactacggcaccccgatggtcgaccgctggcggatgggccccggcttcatcggtggcgatgccggcagcgccctcatcctcaccaagcgacccggcttcgcgcggctccgctcggtctgcaccaagtcggtcccggaggccgagcggctgcaccggggcgacgagccgctgttccccccgagcgtcctgaccggccgggagctgaacttcaccgcccggatcgaccaacagttcgccgcccgcagccccgcctcgatcgccatggcggacgtcggcgaccacatcgaggaggtcgtggggcgcgccctcgccgaggcggagatcgaggtcggcgacctcgccagggtcgccttcatgaacttttcccgggagatcatggagcagcgctgcctggccaactggggcctgcccatgagccggtccaccttcgacttcggtcgccggatcgggcactgcggggcgagcgaccccttgctggccctggaacacctggccaggacggggggcctcggccccggcgatcacctgctgaccctcggcaccgcgccgggcgtggtggtgtcgtgcgcgatcgtccaggtgatcgagtcgccgacgtggcgggagtga

SEQ ID NO: 87 - protein, 456 aa, Streptomyces mobaraensis
VLPLLAAGLLLWHGAAGKGGGHSGSGGAARGGPPVEAWRLLLALAVVVAVARGLGTLASRYLGQPRVVGEMVSGIVLGPSMLGLVAPRAYDALFPAALHAYLNLVAQIGLALFMFLIGMEFGETRHEDTGRTGVAVGLVGVCLSFGLGCGLGYALYTGYAPEGVGFLPFTLFLGLAMSVTAFPVLARLLMERGMLQSRAGAYAIVGAATADLACWLLLAGVVALLRGGSPLGVLRTLALTAAFFGVMVVVVRPALRRLLERPERRLADGGVLTLIIPGVLLSAVATELIGIHLIFGAFLFGAVCPKSTPVLENARGKLQELVTAVLLPPFFASVGVKTDLLRLGDGGGALWVWAGVALLVAVAGKLTGSAAAAALMSVERVDALRIGVLMNCRGLTELVILTIGLDLGVLSPALFTMLVVVTLCATVMTAPLLDLLDRAEARRAAPAPAKAAAVAR

SEQ ID NO: 88 - DNA, 1371 bp, Streptomyces mobaraensis
gtgctgccgctgctggccgcgggcctgctgctgtggcacggcgccgcgggcaagggcggcgggcactccgggtccgggggcgccgcgcggggcggaccccccgtcgaggcgtggcggttgctgctcgccctcgccgtggtggtggccgtcgcgcggggcctcgggacgctggcgagccggtacctggggcagccgcgcgtggtgggcgagatggtctccgggatcgtcctgggcccctcgatgctcggcctcgtcgccccccgcgcctacgacgccctcttccccgccgccctccacgcgtacctcaacctcgtcgcccagatcgggctggcgctgttcatgttcctgatcggcatggagttcggcgagacccggcacgaggacacgggccgcaccggcgtcgccgtgggactcgtcggcgtctgcctgtcgttcgggctcggctgcggcctggggtacgcgctgtacaccggctacgccccggagggcgtcggcttcctgccgttcaccctgttcctgggcctggccatgagcgtgaccgccttccccgtactggcccggctgctgatggaacgcggcatgctgcagtcccgggcgggcgcgtacgccatcgtgggggcggccaccgccgacctcgcctgctggctgctgctcgcgggcgtcgtcgcgctgctgcgcggcggttcgccgctgggcgtgctgcgcaccctcgcgctgaccgcggccttcttcggcgtcatggtggtggtcgtccgccccgccctgcgccgcctcctggaacggcccgagcgccggctcgccgacggcggtgtactcaccctgatcatcccgggcgtcctgctgtcggcggtcgccaccgagctgatcggcatccacctcatcttcggcgccttcctcttcggtgccgtctgcccgaagtcgacgccggtcctggagaacgcccgcggcaaactgcaggaactcgtcacggccgtgctgctgcccccgttcttcgcctcggtcggggtgaagaccgacctgctgcggctcggtgacggcggcggggccctgtgggtgtgggccggtgtcgccctcctcgtcgccgtcgcggggaagttgacgggcagcgcggccgcggcggcgctgatgtcggtggaacgcgtcgacgccctgcgcatcggcgtgctcatgaactgccgcgggctgaccgagctggtgatcctcaccatcggactcgacctcggcgtcctgtcgccggcgctgttcaccatgctggtcgtggtcaccctgtgcgccaccgtcatgaccgctccgctgctcgacctgctggaccgcgcggaggcgcgccgcgccgcgcccgctcccgcgaaggcggcggccgtggcccgctga

SEQ ID NO: 89 - protein, 442 aa, Micromonospora carbonacea aurantiaca
MIASAAPVAPLASHQLLLFLLEVGVLLLLAVILGRLAQRFGLPAVVGELLTGILLGPSLLGQLAPSVGHWLLPGEPSQMHLLDALGQFSVVLLVGVAGLHVDLRLIRRRAGTVATVTMGGLLLPLGLGVATGLLVPAALLAATDQRVMFAFFLGVAMAVSAVPVIAKTLTDMRLMHRDVGQLILAAASLDDAFAWFMLSLISSMAVSALTVGNVLASLLNLVLFIVAAALIGRPVVRRAMRWANAQIDVGPAVAIAVVTVLLFSAAGHALGLEAIFGALVAGVLLGLPGGVEPARLAPLRTVVLSVLAPLFLATAGLRVDLRALADPVVLVAGLVILVLAVLGKFCGAYLAGRLTRQSHWEAVALGAGLNSRGVVEIVIAMVGLRLGILNTATYTIVVLVAVLTSVMAPPMLQRAMRRIEHNAEEALREENQAQLITRPVVR

SEQ ID NO: 90 - DNA, 1329 bp, Micromonospora carbonacea aurantiaca
atgatcgcgagcgccgcacccgtggctcccctggcttcacatcaattgttgttgtttcttctcgaggtcggggtcctgttgctgctggccgtcattctgggccggttggcgcagcgtttcggcctgccggcggtcgtcggcgagttgctgaccgggatcttgctcgggccgtcgttgctgggccagttggcgccctccgtcgggcattggctgctgcccggtgagccgtcgcagatgcacctgctggacgcgctcgggcagttcagcgtcgtgctgctggtcggcgtggccgggctgcacgtcgacctgcgactgatccgacgccgggccggcacggtcgccacggtgaccatgggtggcctcctgctgcccctcgggttgggcgtggccaccggcctgctggtgccggcggcgctgttggcggcgacggaccagcgcgtgatgttcgccttcttcctcggggtggcgatggccgtcagcgccgtgccggtgatcgccaagacgctcaccgacatgcggctgatgcaccgtgacgtcggtcagctcatcctcgccgcagcgtccctggacgacgcgttcgcctggttcatgctgtcgctgatctcgtccatggcggtcagcgccctcaccgtggggaacgtgctggcctcgctgctcaacctcgtcctgttcatcgtcgcggcggcgctgatcggccgcccggtggtcaggcgtgcgatgcggtgggcgaacgcccagatcgacgtggggccagccgtcgccatcgcggtcgtcaccgtcctgctgttctcggcggccggacacgcgctcggccttgaggcgatcttcggcgcattggtggcgggagtcctgctcgggctgcccggaggcgtcgagccggcccggctggcgccgttgcgtaccgtggtgctctccgtgctggcgccgctcttcctggccaccgccgggctccgggtcgacctgcgcgccctcgccgacccggtggtgctcgtggccggtctggtgatcctggtgctcgccgtcctgggcaagttctgcggcgcgtacctggcaggccggctgacgcgccagagccactgggaggcggtcgccctcggggcgggactcaactcacggggcgtcgtggagatcgtcatcgcgatggtcgggctgcgcctgggcatcctcaacaccgccacctacacgatcgtggtgctcgtcgccgtcctcacgtccgtcatggcgccgccgatgctccagcgggcgatgcgccggatcgagcacaatgccgaggaggcgctgcgggaggagaaccaggcgcagttgatcacccgcccggtggtgcggtga

SEQ ID NO: 91 - protein, 445 aa, Micromonospora carbonacea africana
VIVAAPVPPLGSHQLLLFLLQVGLLLLLAVVLGRVAQRFGLPAVVGELLTGVLLGPSVLGALAPDIGRWLLPADPDQVHLLDAIGQFGVVLLVAVAGLHLDLRLVRRRAGTIGAVAVGGLAVPLGLGIAAGLLAPAALLAAGQERTVFALFVGVAMAVSAVPVIAKTLTDMRLLHRDVGQIILAAASLEDAAAWFLLSLISSVAVSTLTAGQVVTALLYLVAYLAVAVLVGRPVTRRAMRWANAQPDGGAASAVAVVIVLAFAAGAHALGLEAIFGALVAGVLIGLPGNGEPARLAPLRTVVLSVLAPIFLASAGLRVDLRALADPEVLAAGAVILALAVLGKYTGAYLGARLARQSHWEGVALGAGLNARGAVEIIIAMVGLRLGVLNTASYTIVVLVAVVTSVMAPPMLRVAMRRVEQNAEETLRESRHLEWAATPAVDQRPG

SEQ ID NO: 92 - DNA, 1338 bp, Micromonospora carbonacea africana
gtgatcgtggccgcgccggtgcccccgctgggctcccaccagctactgctgttcctgctccaggtgggcctgctgctgctgctcgccgtcgtcctgggacgggtggcgcaacgcttcggcctgccggcggtggtcggtgagctgctgaccggggtgctgctcggcccctcggtgctgggggccctggcacccgacatcggacggtggctgctgcccgccgaccccgaccaggtccacctgctcgacgccatcggtcagttcggcgtcgtactgctggtcgccgtggccggtctgcacctggacctgcggctggtccggcggcgggccggcacgatcggcgcggtggccgtcggcggcctcgcggtgcccctcggcctgggcatcgccgccggcctgctggccccggcggcgcttctcgcggccgggcaggagcggactgtcttcgcgctgttcgtcggcgtggcgatggcggtcagcgccgtgccggtgatcgcgaagacgctcaccgacatgcgcctgctgcaccgcgacgtggggcagatcatcctggctgcggcgtcgctggaggacgctgcggcctggttcctgctgtcgctcatctcgtcggtggcggtgagcaccctcaccgccgggcaggtggtgaccgccctgctttacctcgtggcctacctcgcggtggccgtcctggtcggccggccggtgacccggcgcgccatgcgctgggcgaacgcccagcccgacggcggggccgccagcgccgtcgccgtggtgatcgtgctggccttcgcggcgggggcgcacgcgctgggcctggaggcgatcttcggcgcgctggtggcgggtgtcctgatcggccttcccggcaacggggagccggcccggctggcaccgctgcgcacggtggtgctgtccgtgctcgccccgatcttcctggccagcgcggggctccgggtcgatctgcgtgccctcgccgacccggaggtgctcgccgccggggcggtgatcctggcgctcgccgtgctcggcaagtacaccggcgcgtacctgggtgcacggctggcccggcagagccactgggagggcgtcgccctcggcgccgggctcaacgcgcgcggtgccgtggagatcatcatcgcgatggtcgggctgcgcctgggcgtgctgaacaccgcctcatacaccatcgtggtgctggtcgcggtcgtcacctcggtcatggcgccgccgatgctgcgcgtcgccatgcggcgggtcgaacagaacgccgaggagaccctgcgggagagccgccacctggagtgggccgccacccctgcggtggaccagcggccgggctga

SEQ ID NO: 93 - protein, 348 aa, Streptomyces mobaraensis
MEEQHNAPAPWADVIRLVFGGMATQVVGLAVRLRLPDAIGAGERTADGLAARFDGEPAAMNRLLRGLAALGVLREPEPGVFDLTPVGELLRADRSPSFHALSRMLTDPAVSTAWQHLDHSVRTGGPAFDQVFGRDFFAHLADDPDLSGLYNAAMSQGTRGIADLVALRQDFSGVRTVVDVGGGDGTLLAAVLRAHPALRGVLYDTATGAARAGEELAAAGVADRATVETGDFFAAVPPGGDLYLLKSVVHGWEDERAAAILAHCRRALPAHGRVVMVEHVLPDTVPADAVPTTYLNDLNLLVNGNGLERTRGDFRRLCAAAGLTAGAFTPLDGTDLWLIEAVPAAPAD

SEQ ID NO: 94 - DNA, 1047 bp, Streptomyces mobaraensis
atggaagagcagcacaacgcgccggccccctgggcggacgtgatccggctggtgttcggcggcatggccacccaggtcgtcggcctggcggtacggctccggctgcccgacgcgatcggcgccggcgagcggaccgccgacggcctggccgcccgcttcgacggcgaacccgccgccatgaaccggctgctgcgcggcctcgccgcgctcggggtgctccgcgagcccgagccgggcgtgttcgacctgacgccggtcggcgagctgctgcgcgccgaccgctcgccgtccttccacgcgctgtcccgcatgctcaccgacccggcggtctccacggcctggcagcacctggaccacagcgtccgcaccggcggcccggccttcgaccaggtcttcggccgcgacttcttcgcccacctcgcggacgaccccgacctgtcggggctctacaacgccgccatgagccagggcacccgcggcatcgccgacctggtcgcgctgcgccaggacttctccggcgtccgcaccgtcgtggacgtcgggggcggtgacgggacgctgctcgccgcggtgctgcgcgcgcacccggcgctgcgcggcgtgctgtacgacacggcgaccggggccgcccgggccggcgaggagctggcggcggcgggcgtcgcggaccgcgccacggtggagaccggcgacttcttcgccgccgtgcccccgggcggcgacctctacctgctcaagagcgtcgtccacggctgggaggacgagcgggccgcggcgatcctcgcgcactgccgccgggcgctgcccgcgcacggccgggtcgtcatggtcgagcacgtgctgcccgacaccgtccccgccgacgcggtgcccacgacgtacctcaacgacctcaacctgctggtcaacggcaacgggctggagcgcacccgcggcgacttccggcggctctgcgcggcggcgggcctgacggccggcgcgttcaccccgctggacggcaccgacctgtggctgatcgaggccgtccccgccgccccggcggactga

SEQ ID NO: 95 - protein, 342 aa, Micromonospora carbonacea aurantiaca
VDSPASSPWPAVLRLVFGGMATHVVALAVRLRLPDAIGDEERTAAGVAAEYGFQEGPMLRLLRALAALDLLAEPRPGRFTVTPVGALFRSDRPGSMYPLARMLTDPTMTSAWQNLEFSLRTGGPAFDEAFGIDFFGYLSSHPELSELYNAAMSQGTRGVARVLAGAYDFGRFRTVVDVGGGDGTSLVEILAEHPRLGGVLFDSPSGVHAAEQTLEAAGLTARCRIETGDFFSEVPRDGDLYLLKSVIHGWDDEHAAVILRNCARAAREQGRILLVDHLMPDTVLPGQSPTTYLTDLGLLVNGQGMERTRDDFAGLCAKAGLRIAEVGSLPSTGFHWIELCPD

SEQ ID NO: 96 - DNA, 1029 bp, Micromonospora carbonacea aurantiaca
gtggatagccctgcgagctccccgtggccggcagtgctgcggctggtgttcggcgggatggcgacgcacgtggtcgcgctcgcggtccggctgcggctgcccgacgcgatcggcgacgaggaacggacagcggcaggtgtcgccgccgagtacggcttccaggagggtccgatgctgcggctgctgcgtgcgctcgccgcgctcgacctgctcgccgaaccccgccccggccggttcaccgtcacccccgtgggcgcgctgttccgcagcgaccggccgggatcgatgtacccgctggcccggatgctgaccgatccgacgatgacgagcgcctggcagaacctcgagttcagcctgcgcaccggcggcccggccttcgacgaggcgttcgggatcgacttcttcggctacctgtcgtcccatccggagctgtccgagctgtacaacgccgcgatgagtcagggcacccggggagtcgccagggtgctggccggcgcgtacgacttcggccgtttccggacggtcgtcgatgtcggcggtggcgacgggacgtcgctcgtcgagatcctggccgagcacccccggctgggcggggtgctcttcgacagcccgtccggtgtgcacgcggccgagcagaccctggaagcggcaggtctgacggcccgctgccggatcgaaacgggagacttcttctcggaggtgccgcgcgatggcgacctgtacctgctcaagagcgtgatccacggctgggacgacgagcatgccgcggtgatcctgcgcaactgtgcccgcgccgccagggaacagggacgcatcctgctcgtcgaccacctgatgccggacaccgtgctgcccgggcagagccccaccacctacctcaccgacctgggcctgctcgtcaacggtcaggggatggagcggacgagggacgacttcgccggcctctgcgccaaggcgggtctgcggatcgccgaggtcgggtcgctgccgtccacgggcttccactggatcgagctctgtcccgattga

SEQ ID NO: 97 - protein, 362 aa, Micromonospora carbonacea africana
MTVPDTDERATTTDEPSARRAQTGADAAWPELMRLVFGGMASRLVGYCVRLGLPDAIGDDERTPQELALRYDARADTMFRVLRALAALRVLTETTPGRFALAPMGALLRGDRPGTLRPLARMLTDPAMTTAWDGLAHSVRTGEPAFDGIFGTDFFSYVGGRPDLSELYNAAMSQVTHSVAAAVAERTDLAGVRTVVDVGGGDGTLLAAVLAANPGVRGVLYDSASGSAEAAGNLRRAGVGDRCRIEVGDFFERVPADADLYLLKSVIHGWGDGRATGILRHCAEAVAPGGRIVMIDHVLPDVVGPAANALAYLTDVGMLVNGQGLERTRGDLERLCGKAGLSLEDVTPLPPTDFHWIESRPA

SEQ ID NO: 98 - DNA, 1089 bp, Micromonospora carbonacea africana
atgaccgtcccggacacggacgagcgggccacgacgaccgacgagcccagcgcccgccgggcgcagaccggcgcggacgccgcctggccggagctgatgcggttggtgttcggcgggatggccagccggctggtcggctactgcgtccggctggggctgcccgacgcgatcggcgacgacgagcgcaccccgcaggagttggcgctgcggtacgacgcccgagcggacaccatgttccgggtgctgcgcgccctggccgcgctgcgggtgctcaccgagaccacacccggccggttcgcgctcgccccgatgggggcgctgctgcgtggggaccgacccggcacgctgcgcccgctggcccggatgctgaccgacccggccatgaccacggcctgggacggcctggcgcacagcgtccgcaccggcgagccggccttcgacggcatcttcggcaccgacttcttcagctacgtgggcgggcgacccgacctttccgagctgtacaacgcggcgatgagccaggtgacccacagcgtcgcggcggccgttgccgagcgtaccgacctggccggcgtgcggacggtggtcgacgtgggcggcggagacggcaccctgctggccgccgtgctcgccgcgaaccccggcgtgcggggcgtgctctacgacagcgccagcggcagcgcggaggcggcggggaacctgcgccgcgccggggtcggcgaccggtgccggatcgaggtgggtgacttcttcgagagggtccccgccgacgccgacctctacctgctcaaaagtgtgatccacggttggggcgacggccgggcgacgggaatcctccggcactgtgccgaggcggtcgccccgggcggccggatcgtcatgatcgaccacgtgctgccggacgtggtcggcccggcggccaacgcgctggcgtacctgaccgacgtggggatgctggtcaacgggcagggcctggagcggacccgaggcgacctggaacggctgtgcggcaaggcggggctgtccctggaggacgtcacgccgctgcctcccaccgacttccactggatcgagtcccggcctgcctga

SEQ ID NO: 99 - protein, 242 aa, Streptomyces mobaraensis
MTSETPAGKGVRMPRSVEDLNVVWEWDDAEGMQVRLAGYQPRDEYLRDRAERIGQLTEALSLHQGVDLFEIGSGEGVMARELAPRVNSLLCADVSQSFLDKTRATCAGVPNVEYHHIRNDYLAGLPDASFDAGFALNVFIHLNAFEVYLYLREIRRVLRPGGRFLFNYLDFGDVTRPQFHEYVASYPGAHPVAVKGFMSWLGSDVVGKLAAEAGLTPVPGSLVDQGGVCFLTLRRDDEGATA

SEQ ID NO: 100 - DNA, 729 bp, Streptomyces mobaraensis
atgaccagcgagacaccggccggcaagggcgtgcgcatgccgcggagcgtcgaggacctcaacgtcgtctgggagtgggacgacgccgaggggatgcaggtgcggctcgccggctaccagccgcgcgacgagtacctgcgcgaccgcgccgagcggatcggccagttgacggaggcgctgtccctgcaccagggcgtcgacctgttcgagatcggcagtggcgagggcgtcatggcccgcgagctggcgccccgggtcaacagcctgctctgcgcggacgtcagccagtcgttcctggacaagacccgcgccacctgcgcgggcgtcccgaacgtcgagtaccaccacattcggaacgactacctggccgggctgccggacgcctcgttcgacgccgggttcgcgctgaacgtgttcatccacctgaacgccttcgaggtctacctctacctgcgcgagatccgccgggtgctgcgccccggcggccggttcctcttcaactacctggacttcggcgacgtcaccaggccgcagttccacgagtacgtggcgagctacccgggcgcccacccggtggccgtgaagggcttcatgtcctggctcggcagcgacgtggtcggcaagctcgcggcggaggccgggctgacgcccgtccccgggtcgctggtggaccagggcggcgtctgcttcctcaccctgcgcagggacgacgaaggggcgaccgcgtga

SEQ ID NO: 101 - protein, 240 aa, Micromonospora carbonacea aurantiaca
MSNAQGTPATGPKPPLRSMGDLNMVWEWRTPDEMQIQLAGTQPRDEYLQDRVDRAKWMAERLGITPESSIFEIGSGEGIMANVLAPSVRRMLCTDVSRSFLDKARVTCQDHANVDYHHIDNDYLAALPSAEFDAGFSLNVFIHLNVFEFFHYFRQIARILRPGGRFGVNFLDIGASTRSFFHFYAERYLTANPVEFKGFLSFHGIDVISSLAVEAGLTPLLDEFVNEDGVCYLILRRDQK

SEQ ID NO: 102 - DNA, 723 bp, Micromonospora carbonacea aurantiaca
atgagcaacgcgcaaggaacacccgccaccggccccaagccgccgctgcggagcatgggcgacctcaacatggtctgggagtggaggacgccggacgagatgcagatccagctcgccggcacccagccccgcgacgagtacctgcaggaccgcgtcgaccgggcgaagtggatggccgagcgcctcgggatcaccccggagtcgtcgatcttcgagatcggcagcggcgaggggatcatggccaacgtcctcgcgccttcggtgcgacggatgctgtgcaccgacgtcagccggtccttcctggacaaggcacgggtcacctgccaggaccatgccaacgtcgactaccaccacatcgacaacgactacctggcggcgttgccgtcggcggagttcgacgcgggcttttcgctgaacgtgttcattcacctcaacgtcttcgagttcttccactacttccgtcagatcgcccggatcctgcggcccggcggcaggttcggggtcaacttcctcgacatcggcgcgtcgacgcgcagcttcttccacttctacgcggagcggtacctgacggcgaacccggtcgagttcaagggtttcctctccttccacggcatcgacgtgatctcctcgttggccgtcgaggccggcctgacgccgctgctggacgagttcgtcaacgaggacggggtctgctacctgatcctgcgccgcgaccagaagtag

SEQ ID NO: 103 - protein, 247 aa, Micromonospora carbonacea africana
MNDAKQATPPPQDAPRGCPLRSTGDLNYVWEWNTPEEMQMQLAGYQPREEYLQDRVDKVALVVEQLGLGPESEIFEIGSGEGIMAAGLADRVRAVLCADVSRSFLDKARATCEGRENVSYHHIENDFLEKLPTAAFDAGFSLNVFIHLNVFEVFLYFRQIRRILRPGGLFCFNFLDLGDNTRGFFHTYAERYRDANPVEFKGFLNWHGVELMTGIAAEAGLTPVTDKMINHDGVVFLTLRSDGEPAA

SEQ ID NO: 104 - DNA, 744 bp, Micromonospora carbonacea africana
atgaacgacgcgaagcaggcgacgccgccgccgcaggacgccccccggggctgtccgctccggagcaccggcgacctcaactacgtctgggagtggaacacgccggaggagatgcagatgcagctcgccggctaccagccgcgcgaggagtacctccaggaccgtgtcgacaaggtcgccctggtcgtcgagcagctcgggctcggcccggaatcggagatcttcgagatcggcagcggcgagggcatcatggcggccgggctcgccgaccgggtgcgcgccgtgctctgcgccgacgtcagccgatccttcctcgacaaggcgcgcgccacctgcgagggccgggagaacgtctcctaccaccacatcgagaacgacttcctggagaagctgccgaccgccgcgttcgacgccgggttctccctgaacgtgttcatccacctcaacgtcttcgaggtcttcctctacttccgtcagatccggcggatcctgcggcccggcgggctgttctgcttcaacttcctggacctcggcgacaacacgcgcggcttcttccacacctacgccgagcggtaccgcgacgcgaaccccgtggagttcaaggggttcctgaactggcacggcgtggagttgatgaccggcatcgccgccgaggccgggctgacgccggtcaccgacaagatgatcaatcacgacggcgtggtgttcctgacgctgcgcagcgacggggagccggcggcgtga

SEQ ID NO: 105 - protein, 238 aa, Streptomyces mobaraensis
VAEPIPVDRLNEWYDELTVEIIERVCAPDSGCLDIGAGGGEILAHMRRAAPEGRHFAVEPLPHYAEGLRRDFPEVTVWQAAAADAQGRDSFVHVVSNPGYSGLRRRPYDRADETLVEIAVDTVRLDDVVPADARVDLVKVDVEGGEVGALRGAAELLRRQSPVVVFEHGGDHAMRDYGTTSDDLWALLVDDLGYTIHTLAGWLAAEPGLDRAAFAAELRTQWYFVAARGPLPTRSHEE

SEQ ID NO: 106 - DNA, 717 bp, Streptomyces mobaraensis
gtggctgagccgatacccgtcgaccggctcaacgagtggtacgacgagctcaccgtcgagatcatcgagcgggtctgcgcccccgactccggctgcctggacatcggcgccggaggcggcgagatcctcgcgcacatgcgccgggccgcccccgagggccggcacttcgcggtcgagccgctgccgcactacgcggaggggctgcgccgggacttccccgaggtcacggtgtggcaggccgccgcggccgacgcccagggccgggacagcttcgtccacgtcgtctccaatcccggctacagcggcctgcgccgccggccgtacgaccgcgccgacgagacgctcgtggagatcgcggtggacaccgtccgcctcgacgacgtcgtcccggccgacgcccgcgtcgacctggtgaaggtggacgtggagggcggcgaggtgggcgccctgcgcggggcggccgagctgctgcgccggcagtcccccgtcgtggtcttcgagcacggcggcgaccacgcgatgcgcgactacggcaccaccagcgacgacctgtgggccctgctggtcgacgacctcggctacacgatccacaccctcgcgggctggctggccgcggagccgggcctcgaccgggccgccttcgccgccgagctgcgcacccagtggtacttcgtcgccgcccgcgggcccctgcccacccgttcccacgaggagtag

SEQ ID NO: 107 - protein, 243 aa, Micromonospora carbonacea aurantiaca
VSGSLAADPAQRNEDYDRLTVEIIERVCGRTAVSVDLGAGVGEITQHLVRVAPEGNHFAVEPLPALADELADRLPSVTVVRAAAADAAGRHSFVHVVSNPGYSGLRRRPYDRPAETLHEITVDTVRLDDVIPADVRVDLIKIDIEGGEVLALRGARDTLRRGRPVIVFEHGGDNVMREYGTTTDDLWSLLVEELGYQVFTLPAWLAGGRALSRAALTTALEQDWYFVADRAAGPATADQKGVD

SEQ ID NO: 108 - DNA, 732 bp, Micromonospora carbonacea aurantiaca
gtgagcggctccctggcggccgaccccgcccagcgcaacgaggactacgaccgactcaccgtcgagatcatcgagcgggtctgcggccggacggccgtgtcggtggacctcggcgccggcgtcggcgagatcacccagcacctggtccgggtggcgccggagggcaaccacttcgccgtcgaaccgttgcccgcactcgccgacgagttggcagaccggctgccgtcggtcacggtcgtcagggcggcagccgccgacgccgcgggccggcacagcttcgtgcacgtggtgtccaaccccggctacagcggcctgcgccgacgtccctacgaccggccggcggagacgctgcacgagatcaccgtggacacggtgcgcctggacgacgtcattcccgcggacgtacgtgtcgacctgatcaagatcgacatcgaggggggcgaggtgctggccctgcggggggcgcgcgacacgttgcggcgtggtcggccggtgatcgtcttcgagcatggcggcgacaacgtcatgcgggagtacggcacgacgacggatgacctgtggtcactgctggtggaggagctgggttaccaggtgttcaccctgccggcgtggctcgcgggcgggcgggcgctgagccgcgccgcgctcaccacggccctggagcaggactggtacttcgtcgcggaccgcgccgccgggcccgcgaccgctgatcagaagggtgtggactga

SEQ ID NO: 109 - protein, 257 aa, Micromonospora carbonacea africana
MSTELSATDEAGALSMNDWYDQLTVALIEQICEPDANTVDIGAGAGDILRHLLRVAPRGRHVAVEALPSYAEGLRRDFPGVTVVAAAAAERTGRDSFVHVVSNPGYSGLRRRPYDRPDETLRELTVDTVRLDDVLPGDRRIDLVKVDTEGGEVLALRGAVELLRRWRPVIVFEHGGDHAMREYGTTSADLWALLVTELGYELRTLPGRRAGQPALDRAGFADALREHWYFVADRPSPGPAGGSGQHEPSAWQKGTEP

SEQ ID NO: 110 - DNA, 774 bp, Micromonospora carbonacea africana
atgtccactgagctttccgcgaccgacgaggccggcgcgctgtcgatgaacgactggtacgaccagctcaccgtggcgctgatcgagcagatctgcgaaccggacgccaacaccgtggacatcggggccggcgccggcgacatcctgcgtcacctgctgcgggtcgccccccgtggccggcacgtggccgtcgaggcgctgccgtcgtacgccgaggggctgcgccgggacttccccggcgtgacggtggtggccgccgccgccgccgagcgcaccggccgggacagcttcgtccacgtggtctccaaccccggctacagcgggctgcgccggcgtccctacgaccgcccggacgagaccctgcgggagctgacggtcgacaccgtccgcctggacgacgtgctccccggtgaccgccggatcgacctggtcaaggtggacaccgagggcggcgaggtgctcgccctgcgcggtgccgtggagctgctccgccgctggcggccggtgatcgtcttcgagcacggcggcgaccacgccatgcgggagtacggcaccaccagcgccgacctgtgggcgctgctcgtgaccgagctgggttacgagctgcgtaccctgcccgggcgccgcgccgggcagccggcgctggaccgggcggggttcgccgacgcgctgcgggagcactggtacttcgtcgccgaccgaccgagcccgggcccggccggcggctccgggcagcacgaaccgtccgcctggcagaagggaaccgaaccatga

SEQ ID NO: 111 - protein, 278 aa, Streptomyces mobaraensis
VVSLLNRLPLVGALTGAPARPRREPTHDEIVAERYRERTDPRPGDWAYAHLLDLRDALAEELRGASGRWLDFGAGTSPYRGLLPGAELETAEMRGGEDLTADHELDADGLSALPDGSFDGILSTQVLEHVTDPDTHLREALRLLRPGGKLVLSTHGVWEEHGGQDLWRWTADGLAAQAERSGFTVDRAVKLTCGPRGLLLLLRYHGRQHGWPAGGPVGLLLRTLTLADRLRPRLVDDYLDRVFGGLGRVEGPAEPFYLDILLTATKPSAPETPERDAK

SEQ ID NO: 112 - DNA, 837 bp, Streptomyces mobaraensis
gtggtgagcctgctgaaccggctgccgctggtgggggccctcaccggagccccggcccgcccgcgccgcgaacccacccacgacgagatcgtcgccgagcgctaccgcgagcggaccgacccgcgccccggcgactgggcctacgcccacctgctcgacctccgcgacgcgctggccgaggagctccgcggggcgtccggccgctggctcgacttcggcgccggcacgtcgccctaccgcggcctgctcccgggcgccgagctggagaccgccgagatgcgcggcggcgaggacctgaccgccgaccacgagctggacgcggacggcctgagcgccctgccggacggctcgttcgacgggatcctctccacccaggtcctggagcacgtgacggacccggacacccacctgcgggaggccctccggctgctgcggcccggcggcaagctggtgctgtccacgcacggggtgtgggaggagcacggcggccaggacctgtggcgctggacggccgacgggctcgcggcccaggccgagcggtccgggttcacggtggaccgcgcggtcaagctcacctgcggcccccgcggcctgctgctcctgctgcgctaccacggccggcagcacggctggccggccggcgggccggtgggactgctgctgcgcaccctgacgctggccgaccggctgcgcccgcgcctcgtcgacgactacctggaccgcgtcttcggcggtctgggacgcgtcgagggcccggccgagcccttctacctggacatcctgctgaccgccaccaagccgagcgcaccggagacgccggagagggacgcgaaatga

SEQ ID NO: 113 - protein, 274 aa, Micromonospora carbonacea aurantiaca
VIGLLGRLPGVNAVLGAVSKQQAEPTLDEVMAERFRERTDPRRGDWAYAHFIDLRDALAEVLGDASGNWLDYGAGTSPYRNLFTAADLKTADIPGGESYPADYALDHDGRCPAPDATFDGVLSTQVLEHVTDADAYLREALRLLRPGGRLVLSTHGVWEEHGGQDLWRWTADGLARQAELAGFAVDRVLKLTCGPRGLLLLLRWYGRENGWPAIGPVGLVLRSLWLVDHLLPSSLDTYLDRAFGDLGRREGPDAPFYLDLLLVARKPHTKETAT

SEQ ID NO: 114 - DNA, 825 bp, Micromonospora carbonacea aurantiaca
gtgatcggcttgctgggccggctcccgggggtgaacgccgtgctcggggccgtctcgaagcagcaggccgagccgaccctcgacgaggtgatggccgaacgtttccgcgaacggacggatccgcgccggggcgactgggcctacgcgcacttcatcgatctgcgcgacgcgctcgccgaggtgctgggcgacgcttccggcaactggctcgactacggcgcgggcacgtcgccgtaccggaacctgttcaccgcggccgatctgaagacggccgacattcccggcggcgagtcctacccggccgactacgcgctcgaccacgacggacgctgtccggcacccgacgcgacgttcgacggcgtgctgtccacccaggtcctcgagcacgtgaccgacgcggacgcctacctgcgtgaggcgctgcggctgttgcggcccgggggccggctggtgctgtccacccacggcgtgtgggaggagcacggcggtcaggacctctggcggtggacggcggacggcctggcccggcaggccgaactggccgggttcgccgtcgaccgggtgctgaagctgacctgcgggccgcgaggactgctgctcctgctgcgctggtacggacgcgagaacggctggcccgcgatcggcccggtcgggttggtgctgcgctccctgtggttggtggaccacctgctacccagctccctggacacgtatctggatcgcgcattcggcgatctcgggagacgcgagggcccggacgcgccgttctatctggaccttctgctcgtcgcccggaaaccccacacgaaggagaccgctacgtga

SEQ ID NO: 115 - protein, 282 aa, Micromonospora carbonacea africana
VTLLRRVPGLGPLLTGAGTAPTGPSLDEVMAERFRERIEPRPGDWAYAHFLDLRDALAEAVRDATGVWLDYGAGTSPYRGLFRSAELQTADIPGGESLPADHALDRDGRCPVPDGTFDGVLSTQVLEHVSDADAYLREAYRLLRPGGRLVLSTHGVWEEHGGQDLWRWTADGLARQAEWAGFTVDRTVKLTCGPRGLLLLLRWYGREHGWPSGGPVGLALRALWLVDRLRPRALDEYLDRAFRHLGRSEGPDQPFYLDILLVASKPHDGAPGPAHRHETRRT

SEQ ID NO: 116 - DNA, 849 bp, Micromonospora carbonacea africana
gtgaccctgctgcggcgcgtacccgggcttggtcccctgctgaccggtgccggcaccgcccccaccggcccgtcgctggacgaggtgatggccgaacggttccgggagcggatcgagccccggcccggggactgggcatacgcccacttcctggacctgcgcgacgcgctggcggaggcggtccgggacgccacgggagtctggctcgactacggcgcgggcacctcgccataccggggcctgttccgctccgccgagttgcagaccgccgacatcccgggcggtgagtccctgccggccgaccacgccctcgaccgggacgggcgctgcccggtgccggacgggacgttcgacggggtgctctccacccaggtgctcgaacacgtctcggacgcggacgcgtacctgcgggaggcgtaccggctgctgcgcccgggcggccggctggtgctctccacccacggggtgtgggaggagcacggcggccaggacctgtggcggtggaccgccgacgggctggcccgccaggccgagtgggccggcttcaccgtcgaccgcaccgtcaagctgacctgcgggccgcgcggcctgttgctgctgctgcgctggtacggccgcgagcacggctggccgtccggcggcccggtgggtctggccctgcgcgccctgtggctggtggaccggctgcggccccgcgcgctcgacgagtacctcgaccgggcgttccggcatctcggccgcagcgagggccccgaccagcccttctatctggacatcctgctggtcgccagcaaaccgcacgacggggcgcctggtcccgcacaccggcacgagacgaggaggacctga

SEQ ID NO: 117 - protein, 407 aa, Streptomyces mobaraensis
MTTTGHSTVIDRCRICDNTELLPVLDLGPQALTGVFPRTRGEDVPYVPLELVRCSPAGCELVQLRHTADFDLMYGEGYGYRSSLNRSMADHLRGKVAAITRLVDLGPGDLVLDIGSNDGTLLSAYPAGGPALVGVDPAASVFAETYPPGAELIPDFFAAELLGERRAKVVTSIAMFYDLPRPMDFMREIRRVLTDDGIWVTEQSYLPSMLHAAAYDVVCHEHLDYYGLRQIEWMAERTGLKVVDAELTPVYGGSLSLVLARRDSPREVNEPALARIRAGETDLPYAEFARRTEESRDRLVDFLTTSRDKGLRTLGYGASTKGNVILQYCGLDETLLPCIAEVNEDKFGCFTPGTDIPIVSEKEARALEPDRFLVLPWIYRDAMVARERDFLAAGGNLVFPLPALEVV

SEQ ID NO: 118 - DNA, 1224 bp, Streptomyces mobaraensis
atgaccacgaccggtcactcgacggtgatcgaccgttgccggatctgcgacaacaccgagttgctgcccgtgctcgacctcggtccgcaggcactcaccggggtgttcccgcggacccgcggcgaggacgtcccgtacgtcccgctggagctggtgcgctgctcgcccgccggctgcgagctggtgcagctccggcacaccgccgacttcgacctcatgtacggcgagggctacggctaccggtccagcctcaaccgctccatggcggaccacctgcgcggcaaggtcgccgccatcacccggctggtcgacctcggccccggcgacctggtcctggacatcggcagcaacgacggcaccctgctgtcggcctaccccgcgggcggccccgccctggtcggcgtggaccccgccgcctccgtcttcgccgagacctacccgccgggcgccgagctgatccccgacttcttcgccgccgaactgctcggcgagcgccgcgccaaggtcgtcacctcgatcgcgatgttctacgacctgccccgtcccatggacttcatgcgcgagatccgccgcgtcctgacggacgacgggatctgggtgaccgagcagagctacctgccgtcgatgctgcacgccgccgcctacgacgtcgtctgccacgagcacctggactactacgggctccgccagatcgagtggatggccgaacgcaccggcctgaaggtcgtggacgccgagctgacccccgtctacggcggcagcctctcgctcgtcctggcccggcgcgactccccgcgcgaggtcaacgagccggccctggcccggatccgcgccggcgagacggacctgccctacgccgagttcgcccggcggaccgaggaatcccgcgaccggctcgtggacttcctcaccacctcgcgggacaaggggctgcgcaccctcgggtacggcgcctccaccaagggcaacgtcatcctccagtactgcggcctggacgagacgctcctgccgtgcatcgccgaggtgaacgaggacaagttcggctgcttcacgcccggcacggacatcccgatcgtctccgagaaggaggcccgggcgctggagccggaccggttcctggtcctcccgtggatctaccgggacgcgatggtcgcccgggaacgcgacttcctggcggccggcggcaacctggtcttcccgctgcccgccctggaagtggtgtga

SEQ ID NO: 119 - protein, 429 aa, Micromonospora carbonacea aurantiaca
VSRTASAYDESVVRQVNARTDCRVCGGTLRTILDLGDQYLQGSFVKPGTPEPPAVKFPLELTRCVGDCGLVQLRHTLPPGLLYDTYWYRSRINDTMRTHLREIAESGVAALGRPLRRALDIGCNDGTLLQNLRGAELWGIDPSNATDDAPEGITLVRDFFPSPALDEHAGTFDVVTSIAMFYDVEDPVAFARAVERMLAPGGVWVVEVAYLREMLATTGYDSICHEHLSYYSLSTLTFILRQAGLEIRRASVNGMNGGSICCVVTRATEGADHADGSVAELAAQERELGLDQSEPYERFADNVRAHRDELVKMLHGLRDSGSTVHVYGASTKGNTLLQYCGIDRTLIPYAAERNPDKVGARTLGTDIEIISEADSRARRPDHYLVLPWHFHDEIVAREAATVAAGTKLIFPLPSLRVVQASRTDSRVGS

SEQ ID NO: 120 - DNA, 1290 bp, Micromonospora carbonacea aurantiaca
gtgagtcggaccgcatcagcgtatgacgagagcgtggtacgacaggtgaacgcgcggacggactgccgggtctgcggcggcacgctccgtacgatcctcgacctcggcgaccagtatctgcaggggtccttcgtcaagcccgggacacccgagccgccggcggtcaagttcccgctcgaactcacccgctgcgtcggcgactgcggcctcgtgcagctgcggcacaccctgccccccggtctgctgtacgacacctactggtaccgctcgcgcatcaacgacaccatgcggacgcacctcagggagatcgccgaatccggggtggcggcactcggccggccgctccggcgggccctggacatcggttgcaacgacggcaccctgctgcagaacctgcgcggggccgaactgtgggggatcgacccgtcgaacgcgaccgacgacgcgcccgagggcatcaccctggtccgggacttcttccccagcccggcgctggacgagcacgccgggacgttcgacgtcgtcacgtcgatcgcgatgttctacgacgtcgaggacccggtggcgttcgcccgcgcggtggagcggatgctcgctcccggtggcgtctgggtggtcgaggtcgcctacctgcgcgagatgctggcgaccaccgggtacgacagcatctgccacgaacacctgtcgtactactcgctctccaccctgaccttcatcctgcgtcaggccgggctcgagatcaggcgggcaagcgtcaacgggatgaacggcggctcgatctgctgcgtcgtcacccgggccaccgagggcgccgaccacgccgacgggtcggtggcggaactcgccgcgcaggagcgcgagctgggactggaccagagcgagccgtacgagcggttcgccgacaacgtgcgggcgcaccgcgacgaactcgtcaagatgctgcatggtctgcgcgacagcggaagcaccgtgcacgtctacggcgcctccaccaagggcaacaccctcctgcagtactgcgggatcgaccgcacgctgatcccgtacgccgccgagcgcaacccggacaaggtcggcgcgcggaccctcggtacggacatcgagatcatcagcgaggccgactcgcgggcccgccgcccggaccactacctggtgctgccgtggcacttccacgacgagatcgtggcgcgcgaggcggccacggtggcggccggaaccaagctgatcttcccgctgcccagcctgcgggtcgtgcaggcgtcgcggaccgactcgcgggtggggtcgtga

SEQ ID NO: 121 - protein, 426 aa, Micromonospora carbonacea africana
VSQLAAAGEELASEVVERTTCRVCGGTLRTVLDLGAQYLQGSFVKPGVSDPPRVRFPLELTRCAERDGGDPCGLVQLRHTLPGGLLYDTYWYRSRINDTMRRHLADVVDAAVEVLGERPGKVLDIGCNDGTLLGNLTDAQRWGIDPSSAADDAPDDFNLIRDFFPSPELVPHAGSFDLVTSIAMFYDVEDPVEFARQVEALLAPGGVWVVEVAYLPAMLEIAGYDSICHEHLSYYSLATLSRILGAAGLEIVRASLNGVNGGSICCVVTRAGEVGGRADGSVKALADRELALGLDGDAPYQRFAEQVRQHRDEVSALLRELRGQGRTVHVYGASTKGNTLLQFCGIDRELIRYAAERNPDKVGARTLGTDIEIISEQESRAARPDYYLVLPWHFRDEIVAREAEMLASGTRLIFPLPRVETVGRPG

SEQ ID NO: 122 - DNA, 1281 bp, Micromonospora carbonacea africana
gtgagccagttggcggcggccggcgaggagttggcgtcggaggtggtcgagcggaccacctgccgggtgtgtggcgggaccctgcgtacggtcctcgacctcggtgcccagtacctacagggcagcttcgtgaagcccggcgtgtcggacccgcccagggtgcgcttccccctggagctgacccggtgcgcggaacgcgacggcggtgacccgtgcggcctggtgcagttgcggcacaccctgccgggtgggctgctctacgacacctactggtaccgctcgcggatcaacgacacgatgcgccggcatctcgccgacgtcgtggacgcggcggtcgaggtgttgggggagcggcccggcaaggtgctcgacatcggctgcaacgacggcaccctgctgggcaacctgaccgacgcgcagcggtggggcatcgacccctccagcgccgccgacgacgcgcccgacgacttcaatctgatccgcgacttcttccccagccccgagctggtcccgcacgcgggcagcttcgacctggtcacctcgatcgcgatgttctacgacgtcgaggacccggtggagttcgcccgtcaggtcgaggcgctgctcgccccgggcggggtctgggtggtcgaggtcgcctacctgccggcgatgctggagatcgccggctacgacagcatctgccacgagcacctgtcctactactcgctggccacgctgagccgcattctgggcgcggcgggcctggagatcgtccgtgccagcctcaacggggtgaacggcggctcgatctgctgcgtggtcacccgggccggtgaggtgggcggccgggccgacggttcggtcaaggcactcgccgaccgggagctggcgctggggctggacggcgacgccccgtaccagcgcttcgccgagcaggtgcgccagcaccgtgacgaggtgagcgccctgctgcgcgagctgcggggccagggccgcacggtgcacgtctacggcgcgtcgacgaagggcaacaccctcctgcagttctgcggcatagaccgcgagctcatccggtacgccgcggagcgcaatccggacaaggtgggcgcgcgcaccctcggcacggacatcgaaatcatcagcgagcaggagtcgcgggcggcccgcccggactactacctggtcctgccctggcacttccgggacgagatcgtcgcccgggaggcggagatgctggccagcggcacccggttgatctttccgctgccccgggtcgagacggtcggccgaccgggatga

SEQ ID NO: 123 - protein, 285 aa, Streptomyces mobaraensis
MPAARRITSRNARFQQWQALLGNRNKRTRAGEFLVTGVRPISLAVEQGWPVHTLLFDGQRQLSKWAKELLRTVRTEQVAMASDLMMELGEKSEAPPEVIAVVEMPADDLGRIPVREDFLGVLFDRPTSPGNIGSIIRSADALGAHGLIVAGHAADVYDPKSVRSSTGSLFSLPAVRVPSPAEVMEWVEARRAGGTPIVLVGTDEDGECDVFDFDFTQPTLLLVGNETAGLSNTWRGLCDHTVSIPMTGSASSLNAANAATAVLYETVRQRIGQRKKASNSPSSRG

SEQ ID NO: 124 - DNA, 858 bp, Streptomyces mobaraensis
atgccggcggctcggcggatcacctcacgcaacgctcgcttccagcagtggcaggcgctgctcggcaaccgcaacaagcggacgcgtgccggtgagttcctggtgacgggcgtccgcccgatctcgctcgcggtggagcagggctggcccgtgcacacgctcctcttcgacgggcagcggcagctctcgaagtgggcgaaggaactcctccgcacggtgcggaccgagcaggtcgcgatggcctcggacctgatgatggagctgggcgagaagagcgaggccccgcccgaggtcatcgccgtcgtggagatgcccgccgacgacctgggccggatcccggtccgggaggacttcctgggcgtgctcttcgaccggccgaccagcccggggaacatcggcagcatcatccgctcggccgacgccctgggcgcccacggcctgatcgtggccgggcacgccgccgacgtctacgaccccaagtcggtccggtcgagcaccggctcgctgttctccctgcccgccgtccgggtgccgtcgccggccgaggtgatggagtgggtggaggcccgccgggccggcgggacgccgatcgtgctggtcggcacggacgaggacggcgagtgcgacgtcttcgacttcgacttcacccagccgaccctgctgctggtcggcaacgagacggccgggctcagcaacacctggcgcgggctgtgcgaccacacggtcagcatcccgatgaccggctccgcgagctcgctgaacgccgcgaacgccgcgaccgcggtcctctacgagaccgtccggcagcggatcggtcagcggaagaaggccagcaactcccccagcagccgagggtag

SEQ ID NO: 125 - protein, 265 aa, Micromonospora carbonacea aurantiaca
VEARLERRNARFQQWEALLTNRNTRHRLGEFLVQGVRPINEAIAHHWRIRALLHAGNLRSQWARDLVREQVADEVIRLSPELLHELAGKDEDTTELIAVVAIPPDDLTRIRVRPNGVLVVLDRPISPGNVGSLLRSADALGIDGVIVAGRAADLYDPKTVRGSRGSLFAVPAVRAETPTAVLEWLRTIDAMTLVGTSEDAVTDIWNHDFTGPTAVVVGNETSGMSSFWANNCDVVLRIPMVGSASSLNATVAASITLYEITRQRA

SEQ ID NO: 126 - DNA, 798 bp, Micromonospora carbonacea aurantiaca
gtggaggcccggctggagcggcgcaacgccagattccagcagtgggaggcgctgctgaccaaccggaacacgcggcaccggctgggtgagttcctggtgcagggcgtacgcccgatcaacgaggcgatcgcgcaccactggcggatccgggcgctgctgcacgcggggaacctgagatcgcagtgggcgcgtgacctggtcagggagcaggtcgccgacgaggtgatccggctgtccccggagctgctgcacgagctcgcgggaaaggacgaggacaccaccgagctgatcgccgtcgtcgcgatccctccggacgacctcacccggatccgcgtacgcccgaacggcgttctggtggtgctcgaccgtccgatcagtccgggcaacgtgggctcgctcctgcgctcggccgacgcgctgggcatcgacggggtgatcgtcgcgggccgggcggccgacctctacgacccgaagacggttcggggcagccgcggctcgctgttcgccgttccggcggtgcgggccgagaccccgaccgccgtgctggaatggctgcggacgatcgacgcgatgacgctcgtcggcacgagtgaggacgcggtcaccgacatctggaatcacgacttcaccgggccgaccgccgtcgtcgtcggcaacgagacaagcggaatgagcagtttctgggccaacaactgcgacgtggtgctccggatccccatggtcgggtcggcgagttcgctgaacgcgacggtcgccgcctcgatcacgctgtacgagatcacccgacaacgggcgtga

SEQ ID NO: 127 - protein, 250 aa, Streptomyces mobaraensis
VSSYRHAVERSDSSDLACGVVLHSAPGYPAFPVRLATEIFLRAQARLPDDGPVTLWDPCCGSGYLLTVLGLLHRRALRRVIASDVDPAPLELAAKNLALLSPGGLAAREAERREQSERFAKPAYQESADAARRLRDRLEADGGALPYAVGAADVFDPRSLSAVVAGAAPDVVLTDLPYGERTHWDGAVPGQPVTGMLRSLASVLPAHAVIAVTDRSRKIPVAPVPALERLKIGTRSAVLVRAADVLDACP

SEQ ID NO: 128 - DNA, 753 bp, Streptomyces mobaraensis
gtgagttcgtaccgccacgccgtcgagcggagcgacagctccgatctcgcctgcggcgtcgtgctccactccgcgccgggctaccccgccttccccgtccgcctggcgaccgagatcttcctgcgggcgcaggccaggctccccgacgacggcccggtgacgctgtgggacccgtgctgcggcagcggctacctcctgacggtgctggggctgctgcaccgccgcgcgctgcggcgggtgatcgcctccgacgtggaccccgccccgctggaactcgcggccaagaacctcgccctgctctcccccgggggactggccgcgcgcgaggccgagcggcgtgagcagagcgagcgcttcgccaagcccgcgtaccaggagtccgcggatgccgcccgcaggctgcgggaccgcctggaggcggacggcggcgcgctgccgtacgccgtcggcgccgcggacgtcttcgatccgcgttcgctgtccgccgtcgtggccggggccgcgcccgacgtcgtcctgaccgacctgccgtacggcgagcggacgcactgggacggcgcggtgcccgggcagccggtgaccggcatgctgcgctcgctcgcgtcggtgctccccgcgcacgcggtgatcgccgtcaccgaccgcagccggaagatcccggtggctccggtgcccgctctggagcggctgaagatcgggacgcggtcggccgtgctggtccgggcggccgacgtgctggacgcctgcccctga

SEQ ID NO: 129 - protein, 254 aa, Micromonospora carbonacea aurantiaca
VGYRYETTRDDYGDLASGAVLRSAPGFPAFPVRLASEVFQHALDVRGGTDPAVLWDPCCGSGYLLTVLGILHRRSIARLLASDIDADAALTLAAANVGLLAEGGLAARAAELTERARRFDKPGYAEAAAAAGRLSRRLEAAGGPLPYAVRQADVFDPTALASAVGGSEPDLVVTDVPYGEQTEWTGGHAGRGLHGMLTAVASVLRPAAVIAVIVRGRRVPPIGAARPRRKLRVGTRAAALFVAADLNDAGPAHP

SEQ ID NO: 130 - DNA, 765 bp, Micromonospora carbonacea aurantiaca
gtgggctatcggtacgagacgacacgggacgactacggcgatcttgcaagcggggcggttctccggtccgccccgggctttcccgccttccccgtgcggctcgcgtccgaggtgttccagcacgccctcgacgtgcgcggcggcaccgacccggcggtcctgtgggatccgtgctgcggcagcggttacctgctgaccgtgctcgggattctgcaccggcggtcgatcgcgaggctgctggcctcggacatcgacgccgacgcggccctgacattggcggcagccaatgtcggcctgctcgccgagggtggcctggcggcacgggctgcggagttgaccgagcgggctcgacgcttcgacaagcccggctacgccgaggccgcggccgcggccggacggctgagccgccggctcgaggctgccggcggccccctcccgtacgccgtccgacaggccgacgtcttcgacccgacggcgctggcctcggcggtcgggggcagcgaaccggatctcgtcgtgacggacgtcccgtacggcgaacagacggagtggaccggcggtcatgccggtcggggcctgcacggaatgctcaccgccgtcgcttcggtgcttcgaccggccgcggtgatcgcggtgatcgtgcggggccgccgggttccgccgatcggggcggcacgcccccggcgaaaactgagggtgggcacacgagcggcggccctgttcgtggcggccgacctcaacgacgccgggccggcccacccgtaa

SEQ ID NO: 131 - protein, 251 aa, Micromonospora carbonacea africana
VTYRHETVRGAYGDLASGAVLRSAPGFPAFPVRLASEVLQTALELRPTSAPATVWDPCCGSGYLLTVLALLHRPSLAGLLASDVDEAALDLARANLGLLTGAGLDTRARELAQRAEAFDKPHYAEAAAAAHRLRARLDAAGGPLPYAVRRADVFDRVALTEAVAGMTPDLVVTDLPYGEQTSWQGERAGEGLPGMLTRVASVLPPTGVLAVVLRGRKVPPVGEVRPRRRLRVGTRAAAFFVAGDLTGVPAT

SEQ ID NO: 132 - DNA, 756 bp, Micromonospora carbonacea africana
gtgacttaccggcacgaaaccgtacgcggtgcgtacggcgacctggccagtggcgccgtgttgcgctcggcgccgggcttcccggcgttcccggtgcggctcgcctccgaggtcctgcaaaccgcgctggagttgcgcccgacgtccgccccggccaccgtctgggacccgtgctgcggcagcggctacctgctgacggtgctcgcgctgctgcaccggccgagccttgccgggctgctcgcctccgacgtcgacgaggcggccctcgaccttgctcgggccaacctcggcctgctgaccggcgccgggctcgacacgcgggcccgcgagctggcgcaacgcgccgaggcgttcgacaagccgcactacgcggaggcggccgccgccgcccaccggctgcgcgcccgtctggacgcggcaggcggcccgctgccgtacgcggtgcggcgggccgacgtgttcgaccgcgtggccctcaccgaggccgtcgcgggcatgacccccgacctggtcgtgaccgacctgccgtacggggagcagacgagctggcagggggagcgggccggggagggcctgcccgggatgctgaccagggtcgcttccgtgctgccgccgaccggggtgctcgccgtggtcctacgtggacgcaaggtgccgccggtcggtgaggtccgccctcggcggcggttgcgggtgggcaccagagcggcggccttcttcgtcgcaggcgacctgaccggggtgcccgcgacctga

SEQ ID NO: 133 - protein, 355 aa, Streptomyces mobaraensis
MKALILVGGVGSRLRPITHTSAKQLIPVANIPVLSYVLNSIKEAGISEVGMVVGATATEIRAAVGDGAQFGLNVTYLQQDAPRGLADAVLISRDFLGDDDFVMYLGDNYVVDGIVDFVEDFRRDKAAAQVMLARVDDPRRFGVAELDVDGRVTAVVEKPQDPRSDLAIVGVYAFSPLVHEAVAGIKPSWRDELEITDAVQWLVDQGHRVGSTVIDRYWKDIAGVDDVLEMNRHVLETVEGRVDGEVDEASELVGRVVVEAGAKVTGSRIVGPAVIGPDTVVQDSYVGPFTSIDGNCRITHSEIQYSIVLRGASIEGVARVEDSVIGRETEVNAAPRTSTAHRLVLGDHSRVRVGC

SEQ ID NO: 134 - DNA, 1068 bp, Streptomyces mobaraensis
atgaaggcgctcatattggtgggcggggtcggttcgagattgcgcccgatcacgcacacctcggccaaacagctgattccggtggccaatatccccgttctctcctatgtgctgaattccatcaaggaggccgggatatccgaggtcggaatggtcgtcggggccaccgccacggagatccgggccgccgtgggggacggcgcgcagttcgggctgaacgtcacctacctccagcaggacgccccgcgcgggctggccgacgccgtgctcatctcccgtgacttcctgggcgacgacgacttcgtcatgtacctgggcgacaactacgtcgtggacggcatcgtcgacttcgtcgaggacttccgccgcgacaaggccgcggcgcaggtcatgctcgcccgcgtcgacgacccgcgccggttcggcgtggccgaactggacgtcgacggccgggtgaccgccgtcgtcgagaagccccaggacccgcggagcgacctggcgatcgtcggcgtgtacgccttcagcccgctggtgcacgaggccgtggccggcatcaagccctcctggcgcgacgagctggagatcaccgacgcggtgcagtggctggtggaccaggggcaccgggtcggctccacggtcatcgaccgctactggaaggacatcgccggcgtcgacgacgtcctggagatgaaccgccacgtgctggagaccgtcgagggacgcgtcgacggcgaggtggacgaggccagcgagctcgtgggccgcgtcgtggtggaggccggggcgaaggtcaccggatcccgcatcgtcggtcccgccgtcatcggcccggacaccgtggtgcaggactcctacgtcggccccttcacctccatcgacgggaactgccggatcacgcacagcgagatccagtactccatcgtcctgcgcggcgcctcgatcgagggcgtcgcccgggtcgaggactcggtgatcggccgcgagaccgaggtgaacgccgccccccggacgtcgaccgcgcaccgcctggtgctgggagaccacagccgggtccgggtcggctgttga

SEQ ID NO: 135 - protein, 355 aa, Micromonospora carbonacea aurantiaca
VKALVLAGGIGSRMRPITHTSAKQLIPVANKPVLFYGLEAIRDAGIREVGIIVGSTAPEIERAVGDGSQFGLKVTYLPQDAPRGLGHAVLIARDFLGDDDFVMYLGDNFVLGGINDAVERFRRERPHAQLMLTKVKDPHAFGIATMGPDGRVVDVEEKPRYPKSDLALVGVYVFSPVVHEAIAELKPSWRNELEITDAIQWLIDHDRRIESTIITGFWKDTGSLADMLEMNRFILESLDSEVSGEVSADTEITGRVVIGPGAVITGSRIIGPVVVGAGSIIRNSQLGPFTSIDCDCTVIDSEIEQSIVLRGAFIDGIGRIEWSMIGREARLTPGPRAPKTYRFVLGDHSEVRVGV

SEQ ID NO: 136 - DNA, 1068 bp, Micromonospora carbonacea aurantiaca
gtgaaagcgctggtattggcgggtggaatcggctcgcgaatgcgcccgatcacccacacgtcagcgaagcagctcattccggtcgcgaacaaaccggtcctcttctacggcctggaagcaattcgtgacgccgggatccgggaagttggcatcatcgtcggcagcaccgcgccggagatcgagcgggcggtcggtgacggctcgcagttcggcttgaaggtgacctacctgccgcaggacgccccgcgcggtctggggcacgcggtcctgatcgcccgggacttcctcggcgacgacgacttcgtgatgtacctgggcgacaacttcgtcctcggtggcatcaacgacgcggtcgagcggttccgccgggaacgcccgcacgcccagctgatgctgaccaaggtcaaggatccgcacgccttcggcatcgcgacgatgggcccggacggccgggtcgtcgatgtcgaggagaagccccggtatcccaagagcgacctcgctctggtgggcgtgtacgtcttcagcccggtcgtgcacgaggcgatagccgaactgaagccgtcgtggcgcaacgaactggagatcaccgacgccatccagtggctgatcgaccacgacaggcgtatcgaatccaccataatcaccggattctggaaggacaccggcagcctcgcggacatgctggagatgaaccggttcatcctggaaagcctcgactccgaggtgagtggcgaggtcagtgcggacaccgagatcaccggtcgggtcgtgatcgggcccggggcggtcatcaccgggtcgcggatcatcgggcccgtcgtggtcggggccggctcgatcattcgcaactcgcagctcggcccgttcacgtcgatcgactgcgactgcaccgtcatcgacagcgagatcgagcagtccatcgtgctccgcggcgccttcatcgacggcatcggccggatcgagtggtcgatgatcggccgtgaggcgcgcctgaccccgggcccgcgcgcgccgaagacgtaccgcttcgtcctcggcgaccacagtgaagtacgggtaggcgtgtag

SEQ ID NO: 137 - protein, 355 aa, Micromonospora carbonacea africana
VKALVLAGGVGSRLRPITHTSAKQLIPVANKPVLFYGLEAIREGGIEEVGIVVGSTAPEIQRVVGDGSQFGLQVTYLPQEAPRGLAHAVLISRDYLGDDDFVMYLGDNFIVGGIKDIVERFRQERPHAQIMLTRVADPHAFGVAEMGADGRVIGVEEKPEHPKSDLALVGVYVFSPVVHDAVAELKPSWRNELEITDAVQWMIDRGHRVDSTMITGYWKDTGNLADMLEMNRFVLGSVEPLVEGKVDDRTELIGPVVISAGADVSGSRIVGPVVVGAGSIIRNSYLGPYTSIDCDCTLLETEIEHSIVLRGAYIEGIGRIEFSMIGREARVVPGPRVPKTHRFVLGDHSEVRVGV

SEQ ID NO: 138 - DNA, 1068 bp, Micromonospora carbonacea africana
gtgaaggcgctggtcctggcgggaggggtgggatcgagattgcgtccgatcacccacacgtccgccaaacaactcattcccgtggccaacaagccggtgctgttctacgggctcgaggctattcgtgagggcggtatcgaggaggtgggcatcgtcgtcggcagcaccgcgcccgaaattcagcgcgtggtcggcgatggttcccagttcggcctccaggtgacctaccttccgcaggaggctccccgggggctggcgcacgccgtgctcatctcccgcgactacctcggcgacgacgacttcgtcatgtacctcggcgacaacttcatcgtcggcgggatcaaggacatcgtcgagcgcttccggcaggagcgaccgcacgcgcagatcatgctgacccgggtcgccgacccgcacgccttcggcgtcgccgagatgggcgcggacggccgggtgatcggggtggaggagaagcccgagcaccccaagagcgacctggccctggtcggggtctacgtcttcagcccggtggtccacgatgccgtggccgagctgaagccgtcctggcgcaacgagctggagatcaccgacgcggtgcagtggatgatcgaccgcggccaccgggtcgactccaccatgatcacgggctactggaaggacaccggcaacctcgccgacatgctggagatgaaccggttcgtcctcggcagcgtcgagcctttggtcgagggcaaggtcgacgaccgcaccgaactgatcggcccggtggtgatcagcgccggcgccgacgtcagcggctcccggatcgtcggcccggtggtggtcggagccggctcgatcatccgcaactcctacctcggcccgtacacctcgatcgactgcgactgcaccctgctggagaccgagatcgagcactccatcgtgctgcgcggtgcctacatcgagggcatcggccgcatcgagttctcgatgatcggccgggaggcgcgggtggtccccgggccccgggtgcccaagacgcaccggttcgtcctcggcgatcacagcgaagtccgggtgggggtctga

SEQ ID NO: 139 - protein, 336 aa, Streptomyces mobaraensis
MKNERPVRLGVLGCSDIARRRTLPAVQKVPEVTVAAVASRSEDNARAVAARFGGEAVAGYEALLERPDVEAVYISLPTGLHHHWTERALRAGKHVLAEKPLTARYPDTAAAVRLAHSLGLTLMENLTFPQHSMHEAVRGMVEKGDIGELRSMTSEFGFPPLAPGNVRYRADLAGGSLLDAGVYPLAAASMFLGPELDVVGATLRKGPGADVDVAGDALLSAPDGRTAHVSFGFEHAYRCAYTLWGSEGRIIVDRAFTPPPDFCPRVRLERADEVRERVLPADDQFAGTLARFVRAIAGGGAAAHGAEVVARARLVSQVQDRARLLGNGWSGGADGR

SEQ ID NO: 140 - DNA, 1011 bp, Streptomyces mobaraensis
atgaagaacgagcgtcccgtgcggctgggtgttctcggctgctccgacatcgcccggcgccgcaccctcccggccgtacagaaggtcccggaggtgacggtggccgccgtcgcctcccggtccgaggacaacgcccgcgcggtcgcggcgcggttcggcggcgaggccgtcgccggctacgaggcgctgctggagcgaccggacgtcgaagcggtctacatctcgctgcccaccgggctgcaccaccactggaccgagcgggcgctgcgggcgggaaagcacgtgctcgcggagaagccgctgaccgcccggtacccggacaccgcggcggcggtccgcctcgcgcactccctcggcctgacgctgatggagaacctcaccttcccccagcactcgatgcacgaagccgtgcgcgggatggtggagaagggcgacatcggcgaactgcgctcgatgaccagcgagttcggcttcccgccactggcccccggcaacgtccggtaccgggcggacctggccggcggcagcctgctggacgcgggggtgtatccgctcgccgcggcgagcatgttcctcgggccggaactcgacgtggtcggggcgacgctgcggaagggccccggagcggacgtggacgtggccggcgacgcgctgctgagcgcgccggacggccgcacggcgcacgtctccttcggcttcgagcacgcctaccgctgcgcgtacaccctgtgggggagcgagggccggatcatcgtcgaccgcgccttcaccccgccgcccgacttctgccccagggtccggctggaacgcgccgacgaggtacgggagcgcgtcctgccggccgacgaccagttcgccggcaccctggcgcgcttcgtccgggccatcgccggcggcggggcggcggcgcacggcgccgaggtcgtcgcgcgggcccgattggtaagtcaggtgcaggaccgggcacggctgctcggcaacggctggtcaggaggagcagatggccgatga

SEQ ID NO: 141 - protein, 341 aa, Micromonospora carbonacea aurantiaca
VSEVPQRAVVNDPIRFGVLGCADIARRRTLPAILREPTTELVAVAAREQAKARAFAGQFGCAAAADYRSLLSRPDVDAVYIPLPAGLHHEWVGRALEAGKHVLVEKPLTTRYAHTVAMVETARSLGLALMENLTFLRHGLHSAVLDLLEGGEIGELREVNAAFGFPPLGPDDIRYRPDLGGGALLDTGMYPLSAARLFLGPELEVVGATLKLDPERGVDVSGSALLSTPDGRTAQLTFGFEHAYRSDYVLWGSEGRIVVERAYTPPTTRRPVIRLEHEEVRRELTLPPEDQFANTLRAFVGAVAVAGQRAAETVEICARARLIDEIRVKSGQPRVRLPHEV

SEQ ID NO: 142 - DNA, 1026 bp, Micromonospora carbonacea aurantiaca
gtgagtgaggtgccccagcgagcggtggtgaacgatccgatccggttcggcgtactgggatgtgccgacatcgcacggcggcggaccctgccggcgatcctgcgtgagccgacgaccgaactcgtcgccgtcgcggcccgagaacaggcgaaggcccgtgcgttcgccggccagttcggctgcgcggcggccgccgattaccgctcgctgctgagccggccggacgtggacgcggtgtatattcccctgcccgccgggttgcaccacgaatgggtcggccgagcgcttgaggccggtaagcacgtcctggtggagaagccgttgaccacacggtacgcccacaccgtggcgatggtggaaaccgcccggtccctcggcctcgccctgatggagaatctgacctttctccggcatggtctgcacagcgcggtcctggatctgctggagggcggcgagatcggcgaactgcgcgaggtcaacgccgcgttcggattccctcccctcggcccggacgacatccgctaccggccggatctgggcggtggggcactgctcgacacgggcatgtatccgctgagcgccgcccgcctcttcctcggtcccgagctggaggtcgtcggcgcgacgctgaaactggaccccgaacgcggcgtcgacgtgtccggcagcgccctgctgtccactccggacggccggaccgcccagttgaccttcggcttcgagcacgcgtaccggtcggactatgtgctgtggggcagcgaggggcggatcgtcgtcgaacgcgcctacacgccccctaccacgcgacggcccgtcatcaggctggaacacgaggaggtcaggcgggaactgacccttccgccggaggatcagttcgccaacacgctgcgtgccttcgtcggagccgtcgccgtcgcgggtcagcgtgccgccgagacggtggagatctgcgcccgggctcgcctgatcgatgaaattcgggtcaaatcagggcaaccgcgcgtgcggctgccccacgaggtctga

SEQ ID NO: 143 - protein, 344 aa, Micromonospora carbonacea africana
MAEMTVRIGVLGCADIARRRALPAIRRVPEAELVVVAARELAKARAFAAEFGCAAAEGYQSVLDRPDIDAVYIPLPTGLHHTWIERALAAGKHVLVEKPLTTRLVDTAAVLTQARSRGLVLMDNLTFLRHGVHHFVRRMVAAGEIGELRMVSGVFGFPPLPAGDIRYRPELGGGALLDLGVYPLGAARFFLPEEPEVVAATLREDPDRGVDVSGAALLCTPDGRTAQIAFGFEHSYRCEYQLWGSAGRIVVDRAYTPPPAWHPVVRVERQDETRELTFPAEDQFVNTMREFVRAVTAGQPAEEVTAIRARARLLDEVRDRARVLRAPVTCQGPGGRLDAAGARD

SEQ ID NO: 144 - DNA, 1035 bp, Micromonospora carbonacea africana
atggcggagatgacggtccgcatcggggttctcggctgcgccgacatcgcgcgccgccgtgccctgccggcgatcaggcgggtcccggaggcggagctcgtggtggtcgcggcgcgggaactggccaaggcgcgcgccttcgccgcggagttcgggtgcgccgccgccgagggctaccagtccgttctcgaccgcccggacatcgatgccgtctacattccgctgccgaccgggctgcaccacacctggatcgaacgcgccctggccgcgggcaaacacgtgctggtggagaagccgctgaccacccggctggtcgacaccgcggcggtgctgacccaggcccggtcgcgtgggctcgtgttgatggacaacctcaccttcctccgacatggggtgcaccacttcgtgcgccggatggtcgcggccggcgagatcggcgagctgcggatggtctccggcgtcttcgggtttccgccgctgcctgcgggcgacatccgttaccgacccgagctgggtggcggagcgctgctggatctgggcgtctacccgttgggcgcggcccggttcttcctgccggaggagccggaggtggtggcggccaccctccgggaggaccccgatcgcggcgtggacgtttcgggtgccgcgctgttgtgtacgccggacgggcggaccgcacagatcgccttcggtttcgagcactcctaccggtgcgagtaccagctctggggaagcgccggccggatcgtcgtcgaccgggcgtacaccccaccgccggcctggcacccggtggtgcgggtggagcggcaggacgagacgcgggagctgaccttcccggccgaggaccagttcgtcaacacgatgcgagagttcgtccgcgccgtcaccgccggtcagccggcggaggaggtgacggcgatccgcgcccgggcccggctgctggacgaggttcgcgaccgggccagggtgttgcgcgcccccgtgacctgtcaggggccgggcggtcgcctggacgccgccggcgcacgagactga

SEQ ID NO: 145 - protein, 320 aa, Streptomyces mobaraensis
MGALAYITALNQALHDEMARDDRVCVFGEDVRIGLTQTTKGLHERFGDGRVVDTPLSEQAFTSLATGAAMAGQRPVVEYQIPSLLYLVFEQIANQAHKFSLMTGGQVEVPVTYLVPGSGSRSGMAGQHSDHPYSLFAHVGIKTVLPATASDAYGLLLSALRDPDPVAVFAPSALMGTVEEVTGELGPVPLGSARIHRAGEDVTVVATGQCVHTALAVAEAMAGEASIEVVDPRTIYPVDWETIRASAGKTGRLVVIDDANRMSGFAGEVLATAAEQFDLVAPPRRVTRPDGAVIPYALVLDQALLPNGDQLTDAIRAVLK

SEQ ID NO: 146 - DNA, 963 bp, Streptomyces mobaraensis
atgggtgcacttgcgtacatcaccgcgctgaaccaggcgctccacgacgagatggcgcgggacgaccgcgtctgcgtcttcggcgaagacgtgcggatcgggctgacccagaccaccaagggcctgcacgagcgcttcggcgacgggcgcgtcgtggacacgccgctgtcggagcaggcgttcaccagcctggccaccggcgcggcgatggcggggcagcgcccggtcgtggagtaccagatcccgtcgctgctgtacctggtcttcgagcagatcgccaaccaggcgcacaagttctcgctgatgaccggcgggcaggtggaggtccccgtcacctacctggtgccgggctccggttcgcgctccggcatggccggccagcactccgaccacccctacagcctgttcgcgcacgtcggcatcaagaccgtgctgcccgccaccgcctcggacgcctacggcctgctcctctccgcgctgcgcgaccccgacccggtggccgtcttcgcgccgagcgcgctgatgggcacggtcgaggaggtgaccggcgagctcggcccggtaccgctcggctccgcccggatccaccgcgcgggcgaggacgtgaccgtcgtcgccaccggccagtgcgtgcacaccgccctggccgtcgcggaggcgatggccggcgaggcgtcgatcgaggtcgtggacccgcgcaccatctacccggtggactgggagacgatccgggcgtcggccgggaagacgggccggctcgtcgtgatcgacgacgccaaccggatgagcggcttcgccggcgaggtcctggccaccgccgccgagcagttcgacctggtggccccgccccgccgggtgacccggccggacggcgcggtcatcccctacgcgctggtgctcgaccaggcgctgctgcccaacggggaccagctgaccgacgcgatccgcgccgtcctgaagtga

SEQ ID NO: 147 - protein, 320 aa, Micromonospora carbonacea aurantiaca
MPSLSYIAALNQALRDEMARDERVCIFGEDVCLGLTGITKGLAEAHDGRVVDTPLSEQAFTSLATGAAIAGQRPVVEFQIPSLLYLVFEQIANQAHKFSLMTGGQASVPVTYLVPGSGSRSGMAGQHSDHPYSLLAHVGVKTAVPATPSDAYGLLLSAIREPDPVAVFAPTLLMGTSEEIDGDLDAVPLGSARTHREGTDVTVVAVGHLVPVALQVAADLAGEASVEVIDPRTVYPVDWETLGKSISRTGRLVVIDDSNRMCGFGAEIAATAAEEFGLAVPPKRVSRPDGAVIPYALNLDHALLPDALELTKAIRAVLRR

SEQ ID NO: 148 - DNA, 963 bp, Micromonospora carbonacea aurantiaca
atgccgagtctgtcctacatcgcagcgttgaaccaggccctgcgcgacgagatggcccgtgacgaacgggtgtgcatcttcggcgaggacgtctgcctgggcctcaccggcatcaccaaggggctggccgaggcgcacgatggccgggtggtggacacgccgctgtccgagcaggcgttcaccagcctggccaccggggccgccatcgccggccagcgtcccgtcgtcgagttccagatcccgtccctgctgtacctggtgttcgagcagatcgccaaccaggcgcacaagttctcgctgatgaccggcggccaggccagcgtcccggtcacctatctggtacccggctccgggtcccggtcgggcatggccgggcagcactccgaccacccgtacagcctgctcgcgcacgtgggggtcaagaccgcggtgccggcgacgcccagcgacgcgtacggcctgctgctgtcggcgatccgggagccggatccggtcgccgtgttcgcgccgaccctgctgatgggcacgtccgaggagatcgacggtgacctcgacgccgtgccgctgggcagtgcccgtacgcaccgggagggcaccgatgtcacggtggtcgccgtgggccatctggtcccggtcgccctccaggtggccgccgacctggccggcgaggcgtcggtcgaggtcatcgacccgcgcacggtctacccggtcgactgggagaccctgggcaagtcgatcagccggaccggtcggctggtggtgatcgacgactcgaaccggatgtgtggtttcggcgccgagatcgcggcgaccgcggcggaggagttcggcttggcggtaccgccgaagcgggtgtcccggcccgacggcgcagtgatcccgtacgccctgaacctggaccacgcgctgctgcccgacgccctcgaactcaccaaggccatccgggccgtgctgcgtcggtag

SEQ ID NO: 149 - protein, 325 aa, Streptomyces mobaraensis
MGAESRAVRLYRTMRLIREFEERCLAMSLTGEIVGGIHPYIGQEAVAAGVCAALTKDDVVASTHRGHGHVLAKGADPKRMLAELLGTTDGLNRGRGGSMHAADVGLGVYGANGIVGAGAPIAAGAAWSFQQRGEDRVAVAFFGDGALSQGVVLEAFNLAALWRLPVVFVCENNGYATSLPVGRALAGDPVERAAAFGLAARAVDGMDAEAVADAAAQAVERCRAGGGPAYLECRTYRFHGHHSYEEQVALNYRDDAEVGDWRARDPLRTQSTRVDAATVRTVDAEITALIDEAVEFARAGRAPEPHEALDHLYADGTTTRPGVMI

SEQ ID NO: 150 - DNA, 978 bp, Streptomyces mobaraensis
atgggcgccgagtcacgtgccgtccggctctaccggacgatgcgcctgatcagagaattcgaggaacgctgcctggcgatgtcgctcaccggcgagatcgtcggcggcatccacccctacatcggccaggaggcggtggccgccggcgtctgcgcggcgctcaccaaggacgacgtcgtcgccagcacccaccgcgggcacggccacgtcctcgccaagggggccgaccccaagcggatgctggccgagctgctcggcaccaccgacggcctcaaccggggccgcggcggctcgatgcacgccgccgacgtcggcctcggcgtctacggcgccaacggcatcgtcggcgcgggtgcgcccatcgccgccggcgcggcctggtccttccagcagcgcggcgaggaccgggtggcggtcgccttcttcggcgacggcgcgctcagccagggcgtggtgctggaggcgttcaacctcgcggccctgtggcggctcccggtggtgttcgtctgcgagaacaacggctacgcgaccagcctgccggtcggccgggcgctggccggcgacccggtggagcgggcggccgcgttcggcctggcggcgcgcgcggtggacgggatggacgccgaggccgtcgccgacgcggccgcccaggccgtcgagcgctgccgcgcgggcggcggcccggcctacctggagtgccggacgtaccggttccacggccaccactcctacgaggagcaggtggcgctcaactaccgggacgacgccgaggtcggcgactggcgggcccgcgacccgctgcgcacccagagcacccgggtggacgccgcgaccgtccgcacggtcgacgccgagatcaccgcgctcatcgacgaggccgtggagttcgcccgcgcgggccgggcccccgagccccacgaggcgctggaccacctgtatgccgacggcacgacgacacggcccggagtgatgatctga

SEQ ID NO: 151 - protein, 325 aa, Micromonospora carbonacea aurantiaca
VTTEPDRSRYLYRQMRLIREFEEHCLEMAVAGTIVGGIHPYIGQEAVAVGVSAHLREDDVITSTHRGHGHVLAKGADPKRTLAELYGASTGLNRGRGGSMHAADVGLGVYGANGIVGAGAPIAVGAAWAARRQGRDQQVAVAYFGDGALSQGVVLEAFNLAALWSLPVLFVCENNGYAISLPVDRGLAGDPVRRAAGFGLTAEAVDGMDVEAVTEAAGRAVAACRAGGGPHFLECVTYRFRGHHTVEHLMGINYRDEAEVASWTERDPLARQRARLAPAVADEVDAEIAALIAEAVAFAGSSPGSDPRDALDYLYAGTAPTRPGA

SEQ ID NO: 152 - DNA, 978 bp, Micromonospora carbonacea aurantiaca
gtgacgaccgagccggatcgatctcgatacctctaccgacagatgcgtctcatccgggagttcgaggagcactgcctcgaaatggccgtcgccgggacgatcgtcggtggtatccacccctacatcggtcaggaggccgtcgcggtgggcgtgagcgcccacctgcgagaggacgacgtcatcaccagcacccaccgtgggcacggccacgtgctcgcgaagggcgccgatccgaagcggaccctggccgagctgtacggcgcgagcacgggcctcaaccgggggcgtggtgggtcgatgcacgccgccgacgtggggctgggcgtctacggcgcgaacgggatcgtgggcgcgggcgcacccatcgcggtgggcgcggcctgggcagcccgacgccagggccgtgaccagcaggtggccgtggcgtacttcggcgatggcgcactcagccagggcgtggtgctcgaggccttcaacctggcggcgttgtggtcgctgccggtgctgttcgtctgcgagaacaacgggtacgccatcagcctgccggtcgaccggggcctggcgggcgacccggtgcgtcgggcggccgggttcggcctgaccgccgaagcggtggacgggatggacgtggaggcggtcaccgaggccgcggggcgggcggtggccgcctgccgtgccggtgggggaccgcacttcctcgagtgcgtcacctaccggttccgtggtcaccacaccgtggaacacctgatgggcatcaactaccgcgacgaggccgaggtggccagctggacggaacgtgacccgctggcgcgccagcgggcgcgtctcgcgccggcggtcgccgacgaggtcgacgcggagatcgccgcgctgatcgccgaagccgtcgcgttcgccggatcgagtcccgggtccgacccgcgcgacgctctggactacctgtacgccggcacggcgccgacgcggccgggagcgtga

SEQ ID NO: 153 - protein, 314 aa, Streptomyces mobaraensis
VTDTPAPSRPSPAVPECHIRKTGLLPEHITAFRREGVLAVRGLLTPAELEAAQEAAAGLIDDAWRTRSPHDTIWTLEPDDPDAAPVRIEYVMDKSPVLARLAGHPLLLGAMESLVGPNFIPTWDSMVFKTPAGAPRLAWHRDGQMYRDAVAVTGGGRVIDVGVYLDPAPEDNCVWAIPQSNYWDDERITETADRMNATEWDTTGAVPAVMEPGDALFHNILTLHGAPAVVGKQRRVVYYEYRPGEVERQLGPHTPEYVGLKQQVLRSCLEQRAAAEEHRGEEPFAYRPAEQYRLWDESPAISGLRFPHEEYWRW

SEQ ID NO: 154 - DNA, 945 bp, Streptomyces mobaraensis
gtgaccgacacacccgccccctcccgcccctcccccgcggtccccgaatgccacatccggaagaccggcctgctccccgagcacatcaccgccttccggcgcgagggcgtgctggccgtgcgcggcctgctgacccccgccgaactggaggcggcgcaggaggcggcggccggcctgatcgacgacgcctggcgcacccggtccccgcacgacaccatctggacgctggagcccgacgaccccgacgctgccccggtccgcatcgagtacgtcatggacaagtccccggtactggcccggctcgccggccacccgctgctgctgggcgccatggagtcgctggtcggccccaacttcatcccgacctgggacagcatggtgttcaagaccccggcgggcgcgccccggctggcctggcaccgcgacggccagatgtaccgcgacgccgtcgccgtcaccggcggcggccgggtcatcgacgtgggcgtctacctggacccggcgcccgaggacaactgcgtctgggccatcccgcagtccaactactgggacgacgagcggatcaccgagaccgccgaccggatgaacgccaccgagtgggacacgaccggggcagtccccgccgtgatggagccgggcgacgccctgttccacaacatcctcaccctgcacggcgcccccgcggtggtcggcaagcagcgccgggtcgtctactacgagtaccggcccggcgaggtggagcgccaactcggcccgcacacccccgagtacgtggggctcaagcagcaggtgctgcgctcctgcctggagcagcgggccgcggccgaggagcaccggggcgaggagcccttcgcgtaccgcccggcggagcagtaccggctgtgggacgagtcccccgccatctccggcctgcggttcccgcacgaggagtactggcggtggtga

SEQ ID NO: 155 - protein, 313 aa, Micromonospora carbonacea aurantiaca
MSSVGDLRVVNRIAECDIRRTGLLPEHVTAFRRQGVLVVRGLLTPQELADVQEAGRALIDRAWSTRSMEDTVWTLEPDQPGAAPVRIEYVVDKARPIAMLAGHPLLLRIMEQLVGPNLIPTWDSMVFKTPAGAPRLAWHRDAGLYDNAVGVTGAGRVIDAGIYLDPAPEDNCVWCIPESNYWGDDRLTATADQLNASEWDTTGAVPAVMQPGDLLLHNILTLHGAPAVVGKQRRVIYFEYRPAEVEWQLGPHSAEYIGLKQQVLRSCIQMRANEPQFGDEEPFDYQPAESLRHWVDRPEIDTLRFAHEEYWRW

SEQ ID NO: 156 - DNA, 942 bp, Micromonospora carbonacea aurantiaca
atgagttccgtcggagacctgcgtgtcgtcaaccggatcgcggaatgcgacatccggcggacggggctgctgcccgagcacgtcacggcctttcgccggcagggtgtcctggtcgtccgcgggttgctcacaccgcaggaactggccgacgtccaggaggccggccgggccctgatcgaccgggcgtggtcgacccggtccatggaggacacggtctggacgttggagcccgaccagccgggcgccgcgccggtgcggatcgagtacgtcgtcgacaaggcccgacccatcgccatgctggccggtcatccgttgctgctgcggatcatggagcagttggtcggaccgaatctgatcccgacctgggacagcatggtcttcaagacacccgccggagcgcccaggctggcctggcaccgcgacgccgggctctacgacaacgcggtcggcgtcaccggtgcgggccgggtcatcgacgccgggatctacctcgaccccgcccccgaggacaactgcgtctggtgcatcccggagtcgaactactggggcgacgaccggttgaccgccaccgcggaccagctcaacgcgagcgaatgggacaccaccggggcggtgccagccgtgatgcagccgggggacctcctgttgcacaacattctcacgctgcacggggcgcccgcggtggtcggcaagcagcgccgggtcatctacttcgagtaccggccggccgaggtggaatggcagttgggcccgcacagcgcggagtacatcgggctgaaacagcaggtcctgcgctcctgcatccagatgcgggcgaacgagccgcagttcggcgacgaggagccgttcgactaccagccggccgagtcgctccggcactgggtggaccggccggagatcgacacgctgcgcttcgcgcacgaggagtactggcgatggtga

SEQ ID NO: 157 - protein, 314 aa, Micromonospora carbonacea africana
MSATVDVRTEQAVPECHIHETGLLPEHLTAFRRQGALILRGLLDPDELRSVQAAADELIDEAWRTRTMTDTIWTLEPHEPDAAPVRIEYVVDKSPVVARLAGHPLLLRAMEDLVGPNLIPTWDSMVFKTEAGAPRLPWHRDGGLYPENAVGITGAGRVIDVGIYLDPAPEDNCVWCIPQSNYWDTDRANETTTRMNATEWDTTGAVPAVMNPGDVMLHNILMLHAAPAVTGKRRRVIYFEYRPAEVELDLGPHVPEYIGLKQQVLLSCLAQRRAAPEHAGEQPFEYRPAASLRRWEGLPEPTTMRYPHEEYWRW

SEQ ID NO: 158 - DNA, 945 bp, Micromonospora carbonacea africana
atgagcgcgactgtggacgtccgcaccgagcaggccgtccccgagtgccacatccacgagaccgggctgcttccggagcacctgaccgccttccgccggcagggcgcgctgatcctgcgcgggctgctggaccccgacgagctgcggtccgtgcaggcggcggccgacgagctgatcgacgaagcctggcgcacccggacgatgaccgacaccatctggacgctggaaccgcacgagccggacgcggcgccggtgcggatcgagtacgtggtcgacaagtccccggtggtcgcccggctcgccggccaccccctgctgctgcgggcgatggaggacctggtcggccccaacctcatccccacctgggacagcatggtcttcaagaccgaggcgggggcgccccggctgccctggcaccgcgacggcggcctctacccggagaacgcggtcggcatcaccggcgcgggccgggtgatcgacgtcggcatctaccttgacccggccccggaggacaactgcgtctggtgcatcccgcagtcgaactactgggacaccgaccgggcgaacgagaccaccacccggatgaacgccaccgagtgggacaccaccggggcggtgccggcggtgatgaacccgggcgacgtgatgctgcacaacatcctgatgctgcacgccgcgccggcggtgaccggcaagcggcgccgggtcatctacttcgagtaccggcccgccgaggtcgagctggacctcggcccgcacgtgccggagtacatcgggctcaagcagcaggtgctgctctcctgcctggcgcagcggcgggcggcaccggagcacgccggcgagcagcccttcgagtaccggcccgccgcgtcgctgcggcgctgggagggcctgccggagccgaccaccatgcggtacccgcacgaggagtactggcgttggtga

SEQ ID NO: 159 - protein, 250 aa, Streptomyces mobaraensis
MGAVETVIDEELVAAFRDDGFASLPRLVDDAELEWLRGVYDRLFSEHADFATGDYFDIAARQDSDGPARLPQIVRPEKFAPELVESEHFKRCRAIAARLLDVPEDELDFYGHAILKPPHYGAETPWHQDEGYMDPRWHRRGLSVWTTLDEATVESGCLHYLPGGHLGPVLPHRHIDDDDRIRGLVTDAVDPAAGVAVPLAAGEAVVHTLRAPHYAGPNGTGQTRRAYVLVFMGPVEEVADPEPRPWLDTH

SEQ ID NO: 160 - DNA, 753 bp, Streptomyces mobaraensis
atgggggccgtggaaaccgtgatcgacgaggagctcgtcgcagccttccgggacgacggattcgcatcgctgccgcggctcgtggacgacgcggagctggagtggctgcgcggggtctacgaccgtctgttctccgagcacgccgacttcgcgacgggcgactacttcgacatcgccgcccgccaggattccgacgggccggcccggctgccgcagatcgtgcgccccgagaaattcgcgcccgaactggtcgagagcgagcacttcaagcgctgccgggcgatcgccgcgcggctgctggacgttcccgaggacgagctcgacttctacgggcacgccatcctgaagccgccgcactacggcgccgagacgccctggcaccaggacgagggctacatggacccgcgctggcaccggcgcgggctcagcgtgtggaccacgctggacgaggccacggtggagagcggctgcctgcactacctgcccggcggccacctgggccccgtcctgccgcaccggcacatcgacgacgacgaccgcatccgcgggctggtgaccgacgccgtggaccccgccgccggggtggccgtcccgctcgccgcgggcgaggccgtggtgcacaccctgcgggccccgcactacgcgggccccaacggcaccggccagacccgccgggcgtacgtgctcgtcttcatgggcccggtcgaagaggtggccgaccccgagccgcgcccctggctggacacgcactga

SEQ ID NO: 161 - protein, 252 aa, Micromonospora carbonacea aurantiaca
MDAMEVVGTIDHRDREEFRSRGFAILPQVASESEVAWLRQAYDRLFVRRATPGAEDFYDIAGQRDREGPPLLPQIIKPEKYVPELLDSPHFARCRSIASAFLDMAEEELEFYGHAILKPPRYGAPTPWHQDEAYMDPRWRRRGLSIWTTLDEATVESGCLHYLPGGHRGPVLPHHHIDNDDRIRGLMTDDVDPTSAVACPLAPGGAVVHDFRTPHYAGPNLTDQPRRAYVLVFMSAPAEVADPEPRPWMDWG

SEQ ID NO: 162 - DNA, 759 bp, Micromonospora carbonacea aurantiaca
atggacgcgatggaagtggtgggcaccatagaccaccgtgaccgggaggagttccgcagtcgtgggttcgcgatactcccgcaggtcgcgagcgagtcggaggtggcgtggctgcgccaggcctacgaccggcttttcgtccggcgcgcgaccccgggcgcggaggacttctacgatatcgccggccaacgcgaccgcgaagggccgccactgctgccgcagatcatcaagccggagaaatacgtaccggagttgctggatagcccgcacttcgcgcggtgccggtcaattgcgtcagcctttctcgatatggccgaggaagagctcgagttctacgggcacgccatcctgaagccgccgcgatacggcgctccgacgccgtggcaccaggacgaggcctacatggatccccggtggaggcggcgcgggttgagcatctggacgaccctggacgaggccaccgtcgagagcggctgcctgcactacctgccggggggccaccgcggtccggtgctcccgcaccaccacatcgacaacgacgaccgcatccgtggcctgatgaccgacgacgtcgacccgaccagcgcggtcgcctgcccgctggcgcccgggggcgcggtggtgcacgacttccgaaccccgcactacgccggcccgaacctgaccgaccagcctcggcgcgcgtacgtgctggtgttcatgagcgcgccggccgaggtcgccgaccccgagccccgcccgtggatggactggggatag

SEQ ID NO: 163 - protein, 253 aa, Micromonospora carbonacea africana
MAVGTVGAEVVDRRLEAYRRDGFVTLPQLADDAEVAWLRAAYDRLFADHASPDTGDYRDIAGRGDDAAPARLPQIVRPEKYLPELVETAHFARCRAIASAFLDIPEDELDFYGHAILKPPRYGAPTPWHQDEAYMDPRWSRRGLSIWTPLDEATVSSGCLQYLPGLHRGGVLPHHHINHDDRIEGLMTDEVDDTDSVACPLRPGEAVMHDFRAPHYAGPNETDQPRRAYVLVFMSQPVEVTDPEPRPWLHDRS

SEQ ID NO: 164 - DNA, 762 bp, Micromonospora carbonacea africana
atggccgtggggactgttggtgcggaggtcgtcgaccgtcggctggaggcttaccggcgcgatggcttcgtgactctcccgcagctcgccgacgacgccgaggtcgcctggctccgggccgcctacgaccggctcttcgccgatcacgcgtcgcccgacaccggcgactaccgggacatcgccggccgtggcgacgacgccgcgcctgcccgtctcccgcagatcgtccggccggagaaatacctgccggagttggtggagaccgcgcacttcgcgcgatgccgggccatcgcctccgctttcctcgacatccccgaggacgaactcgacttctacggccacgcgatcctcaagccgccgcgctacggcgcacccactccgtggcaccaggacgaggcgtacatggacccgcgctggtcccgtcgcggcctgagcatctggaccccgctcgacgaggcgacggtgtccagcggctgtctccagtacctgccgggcctgcaccggggcggggtgctcccgcaccatcacatcaaccacgacgaccgcatcgaaggtctgatgacggacgaggtcgacgacacggacagcgtcgcctgcccgctgcggccgggcgaggcggtcatgcacgacttccgtgcgccgcactacgccggcccgaacgagacggaccagccgcgccgcgcgtacgtcctggtgttcatgagccagccggtcgaggtgaccgaccccgagccgcgaccctggctgcacgaccggagctga

SEQ ID NO: 165 - protein, 222 aa, Streptomyces mobaraensis
VNDFVYNGVRYATASTRDYLLSQPPQDRADAFFGAFPQAKRVLELGALEGADTLAMAGQPGVEILALEGREENLRRAEFVMELHGVSNVELRLADVESMDFAALGHFDATLCAGLLYHVQRPWELLADIGSVSDCLYLSTHYWGSSEGLDVVDGYAFHPVREDHPEPQARGLSVDVRWLDRPSLMRALERAGFTDVEVLQERVTPEVCNIVTAARKPGVPRP

SEQ ID NO: 166 - DNA, 669 bp, Streptomyces mobaraensis
gtgaacgacttcgtctacaacggggtccggtacgccaccgcgtccacccgcgactacctgctgagccagcccccgcaggaccgggccgacgccttcttcggcgcgttcccgcaggccaagcgggtcctggagctgggcgcgctggagggcgcggacaccctggcgatggccgggcagccgggcgtcgagatcctcgccctggagggccgcgaggagaacctgcgccgcgccgagttcgtcatggagctgcacggcgtctccaacgtcgaactgcgcctcgccgacgtggagtcgatggacttcgccgccctcggccacttcgacgccacgctgtgcgcgggcctcctctaccacgtgcagcgtccctgggagctgctcgcggacatcggctccgtctccgactgcctctacctctccacccactactggggcagctcggagggcctggacgtcgtcgacggctacgcgttccacccggtccgcgaggaccaccccgagccgcaggcccgcggcctcagcgtcgacgtgcgctggctggaccggccgtccctgatgcgcgccctggagcgggcgggcttcaccgacgtcgaggtcctccaggagcgggtcacccccgaggtctgcaacatcgtcacggccgcccgcaagcccggcgtgccccgcccgtga

SEQ ID NO: 167 - protein, 223 aa, Streptomyces mobaraensis
MTTATHDRAEAIERFRRDGFANAGPVLDPDAIGRLKAGAERLIARFTDEGLRSDDYWNFPVEGDERPVLYRVHNLEKQDWAPERDLLHREELAALASAFVDGPVVPTAYALVLKEPYRAAEVPWHRDRVNVGPRTVCNLSICLDDASPENGCLTAVPGSHLLPDDAVVAEVRAAGPVVQVPVSQGDVVVHDVRLVHGSGPNAGGRWRRTIVIEYADPAAPPAP

SEQ ID NO: 168 - DNA, 672 bp, Streptomyces mobaraensis
atgaccacggcgacacacgaccgcgccgaggcgatcgagcggttccggcgggacggcttcgcgaacgcgggcccggtcctcgacccggacgcgatcgggcgcctcaaggcgggagccgagcggctcatcgcccgcttcaccgacgagggcctgcgttccgacgactactggaacttccccgtcgagggtgacgagcgccccgtcctctaccgcgtgcacaacctggagaagcaggactgggcgccggagcgggacctgctgcaccgcgaggagctggccgcgctggcgtccgcgttcgtggacggtccggtcgtccccaccgcctacgcgctcgtcctcaaggagccgtaccgggccgccgaggtgccctggcaccgcgaccgcgtcaacgtcggcccgcgcacggtctgcaacctgagcatctgcctggacgacgcgagcccggagaacggctgcctgacggcggtcccggggtcgcacctgctccccgacgacgccgtggtggcggaggtccgcgccgccgggcccgtcgtccaggtcccggtgagccagggcgacgtggtggtgcacgacgtccggctcgtccacggttccggcccgaacgccggcggccgctggcggcggaccatcgtcatcgagtacgccgacccggccgcaccgccggcgccctga

SEQ ID NO: 169 - protein, 450 aa, Micromonospora carbonacea aurantiaca
  misc_feature (36)..(36): "any set containing "n".
MDRREIQRRAKELEPWVNGFEFEGIRYAEGSDHGYXLSQDPADRARAFYEAFPGATRILELGALEGADTLALARQPGTSILGLEGREENLRRAEFVMEVHGATNVELRIADVETLDFATLGRFDAVLCAGLLYHVREPWALLKDAARVSAGIYLSTHYWGSSDGLETLDGYSVKHVREEHPEPQARGLSVDVRWLDRASLFAALENAGFVEIEVLHERTSAEVCDIVVVGRARLGAQIRRFREDGFVNAGPVFADDTIARLKAGAIDLISRFTEHGHVSDDYWNYDVENEAPVLYRIHNLEKQDWAERELLFRPELAELAAAFVGSPVVPTAFALVLKEPKRAAGVPWHRDRANVAPHTVCNLSICLDTAGPENGCLEGVPGSHLLPDDIDVPEIRDGGPRVPVPSKVGDVIVHDVRLVHGSGPNPSDQWRRTIVIEFANPAISLPSLPS

SEQ ID NO: 170 - DNA, 1353 bp, Micromonospora carbonacea aurantiaca
  Unsure (106)..(106): "n at position 106 is undetermined and represents a or g or t or c
atggaccgtagggagattcagcgtcgcgcgaaggaactcgagccgtgggtgaacggattcgagttcgagggaattcgttatgcggagggctccgaccacggatatntcctcagccaggatccagccgatcgggcccgggcgttctacgaggcgtttcccggtgcgacccggatcctggagctcggtgcgctcgagggtgcggacaccctcgcattggcccgacagcccggcaccagcattctcgggctcgagggtcgcgaggagaatctgcgtcgcgccgagttcgtgatggaggtgcacggtgccaccaatgtggaactgcggatcgccgacgtggagacgctcgacttcgccaccctggggcggttcgacgccgtcctctgcgccggcctgctgtatcacgtccgggagccctgggcgctgctcaaggacgccgcccgggtttccgccgggatctacctgtcgacccactactggggcagttccgacgggctggagacgctggacgggtattccgtcaagcacgtccgtgaggagcacccggagcctcaggcccgcgggctgagcgtggacgtgcgctggttggaccgggcctcgctgttcgcggccctggagaatgccggcttcgtcgagatcgaggtgctgcacgagcgcacgtcggcggaggtctgcgacatcgtcgtggtcggccgtgcccggctgggtgcgcagatccgtcgattccgggaggatggcttcgtcaacgccggtccggtcttcgccgacgacacgatcgcgcggctcaaggccggtgccatcgacctgatctcccgcttcaccgagcacggccacgtctcggacgactactggaactacgacgtcgagaacgaggctccggtgctctaccggatccacaacctggagaagcaggactgggccgaacgcgagctgctgttccgcccggaactggcggagctggccgccgcgttcgtcgggtcaccggtcgtgcccaccgccttcgccctggtcctgaaggagccgaagagggcggcgggcgtcccgtggcaccgcgaccgggccaacgtcgcaccgcacacggtctgcaacctgagcatctgcctggacaccgcaggcccggagaacggctgtctggaaggtgttccgggctcccacctgctgcccgacgacatcgacgtcccggagatccgcgacggtgggccccgagtgcccgtcccgtcgaaggtgggcgacgtgatcgtgcacgatgtccggctcgtgcacggctcgggccccaaccccagcgaccagtggcgccgaaccatcgtcatcgagttcgcgaatcccgcgatctcactgccgagcctcccgtcctga

SEQ ID NO: 171 - protein, 245 aa, Micromonospora carbonacea africana
MDREEIRRRVAALEPWVNGFEHDGVRYAEGSQHGYLLSQSPADRAAKFFGAFPDARRILELGALEGADTLALARHPGTTVLALEGRPENLRRAELVMEVNGITNVELRVADVERIDFTELGEFDAVLCAGLLYHVREPWTLLKDIAGVAAGIYLSTHYWGGVGDLQPIDGYTVKQVREEHPEPQARGLSVDVRWLDRESLFAALHNAGFAEVEVLHERRSPEVCDIIAVGRRTGTRRPTEGVSLR

SEQ ID NO: 172 - DNA, 738 bp, Micromonospora carbonacea africana
atggaccgtgaagagattcgtcgccgcgtcgccgcgctcgagccgtgggtgaatggattcgagcacgacggagtgcgttacgccgagggctcccagcacggttatctgctgagccagtccccggccgaccgggccgcgaagttcttcggtgcgtttcccgacgcgcggcggatcctcgaactcggcgcactggagggcgcggacacgcttgccctcgcccggcaccccggcacgacggtgcttgccctggagggccgtccggagaacctgcgccgcgcggagctggtgatggaggtcaacggcatcaccaacgtggagctgcgcgtcgccgacgtggagcggatcgacttcaccgagctgggcgagttcgacgccgtcctctgcgcgggcctgctctaccacgtgcgtgagccgtggaccctgctgaaggacatcgcgggcgtcgcggcgggaatctacctctccacccactactggggaggcgtgggcgacctgcaaccgatcgacggctacacggtcaagcaggtccgcgaggagcaccccgagccgcaggcccgggggctcagcgtcgacgtgcgctggctcgaccgggagtccctgttcgccgccctgcacaacgccggcttcgccgaggtggaggtgctgcacgagcgccggtcgccggaggtgtgcgacatcatcgccgtcggccgccgcaccggcacgcgccgaccgaccgaaggggtgagcctccgatga

SEQ ID NO: 173 - protein, 224 aa, Micromonospora carbonacea africana
MTTMSREREAVASRFRSDGIAHVGPVLDPEVLAQLKAGAVSLIDRFAGPARANADYWNYEVEGAEPVLYRIHNLEKQDWPQGELLHRPEIAAVAADVLGTPVVPTAFALVLKEPLRAAGVPWHRDRVNVPPHAVCNISICLDTAGPENGCLEGVPGSHLLPDDADVTAVRDAGPRVPVPSQEGDFIVHDVRLVHGSGPNPSDQWRRTIVIEFADPARELPVLTS

SEQ ID NO: 174 - DNA, 675 bp, Micromonospora carbonacea africana
atgaccaccatgtcgcgggagcgcgaggccgtggccagccggttccgcagcgacgggatcgcgcacgtcgggccggtgctcgaccccgaggtgctggcccagctcaaggccggcgcggtaagcctgatcgaccggttcgccggtccggcgcgggccaacgccgactactggaactacgaggtcgagggcgcggagccggtgctgtaccggatccacaacctcgaaaagcaggactggccgcagggcgagttgctgcaccggccggagatcgccgcggtggccgccgacgtcctcggcaccccggtcgtgcccaccgccttcgcgttggtgctcaaggagccactgcgggcggccggcgtgccgtggcaccgggaccgggtcaacgtccccccgcacgcggtctgcaacatcagcatctgcctggacaccgccgggccggagaacggctgtctggagggcgtgcccggctcccacctgctgcccgacgacgccgacgtcacggccgtgcgcgacgccgggccgcgggtgccggtcccctcgcaggagggggacttcatcgtccacgacgtacggctggtgcacggctccgggccgaacccctccgaccagtggcggcgcaccatcgtgatcgagttcgccgatcccgcgcgggagttgccggtcctgacctcctga

SEQ ID NO: 175 - protein, 241 aa, Streptomyces mobaraensis
MTGHSAIALDVGGVIYYDEPFELAWLQGTFDLAVTADPSVTLRHFIDDTERFYLGGKVPAGRPDILGSAAADESWVRILRAWGELAQEIPGAIAATKALAREIPTAVVANQPPECAGVLAAWGLTAVLETVVLDCFEGVAKPDPRLLGIALDRLGLSPADLLVVGNRADHDVAPARALGCPAVFVLPEDGYRVPPGVHPDIVRAYRALRAVRTAPPVDDDVPRVASLAELAASPLARLGAL

SEQ ID NO: 176 - DNA, 726 bp, Streptomyces mobaraensis
atgactggacacagtgcgattgcgttggatgtcggaggcgtcatctactacgacgagcctttcgaactggcttggcttcaggggaccttcgacctcgcggtcaccgctgatccgagcgtcaccctccgacatttcatcgatgacaccgagcgtttctatctgggcgggaaagtccccgcgggccggcctgacattctcggttcggcggccgccgacgagagctgggtccggatcctgcgtgcctggggcgaactggcccaggagattcccggcgccattgcggcgacgaaggcgctcgcccgcgaaataccgacggccgtggtcgccaaccagccgcccgagtgcgccggcgtgctcgccgcgtgggggctgaccgccgtcctggagacggtcgtcctcgactgcttcgaaggcgtcgccaaacccgatccgcgactgctgggcatcgccctggaccggctgggcctgtcgcccgccgacctgctcgtggtgggcaaccgcgccgaccacgacgtggcgccggcccgcgccctgggctgcccggcggtgttcgtgctgccggaggacggctaccgcgtcccgccgggcgtccacccggacatcgtccgggcctaccgcgccctgcgcgcggtccgcaccgcgcccccggtggacgacgacgtgccgcgggtcgcctccctcgccgagctggccgcgtcgcccctggcgcgcctcggtgcgctgtga

SEQ ID NO: 177 - protein, 249 aa, Micromonospora carbonacea aurantiaca
MTEYGAIALDVGGVIYYDEPFELAWLQATYDLLRSDDPAITRSVFIEHVERFYHSPDDGAAGRTLLHSPAAARAWAQIRRAWHELAQEMPGAVRAAVTLAREVPTVIVANQPPECARVLDAWGLTEACAGVFLDSLVGVAKPDPALLGIALEHLGVAPADLLVVGNRHDHDVLPARALGCPVAFVRADPGYRPPSGVHPDLIRAYTSLRAVRTAPPAGDDERVSVVATLAALARSSATGLRPVTRAESS

SEQ ID NO: 178 - DNA, 750 bp, Micromonospora carbonacea aurantiaca
atgaccgaatacggtgccatcgcgctggatgtcggtggggtcatctattacgatgagccgttcgagctggcgtggctgcaagcgacgtacgatctgctccgatctgacgacccggcgatcacccggtccgttttcatcgagcatgtcgagcgtttctatcactccccggacgacggagccgcaggccggacgctgttgcattcgccggccgccgcccgagcctgggcgcagattcgccgggcctggcacgaactcgcccaggagatgccgggcgcggtccgggcggcggtgacgctggcccgcgaggtcccgacggtgatcgtcgccaaccagcccccggagtgcgcgcgggtgctggatgcctggggactgacagaggcctgcgcgggcgtcttcctcgattcgctcgtgggcgtcgccaagccggatccggcgctgctgggaatcgccctggaacacctcggtgtcgcccccgccgacctgctggtcgtcggcaaccggcacgaccacgacgtcctgccggcgcgggcgctcggctgcccggtcgccttcgtccgcgcggaccccggctaccggccgccgtccggcgtccaccccgatctgatccgggcgtacacgtcgctccgcgccgtccggaccgcgccgccggccggtgacgacgaacgggtgtccgtcgtcgccacgctggcggccctggctcgttcctcggccacgggcctgcgcccggtcactcgcgccgagtcgtcgtga

SEQ ID NO: 179 - protein, 250 aa, Micromonospora carbonacea africana
MTGHSAVALDVGGVVYYDEPFELAWLQDTFDRLQATDPTLDLRAFLEHVERFYHYGEGDPTGRTWLHSEAAALSWSRVRQSWGELAQEIPGAVRAVTRLARELPVVIVANQPPECADVLARWQVSQVCREVLLDSLVGVAKPDPALLGLALRRLAIPPAELLVVGNRTDHDVLPALGLGCPVAFVLPDPAYRRPPGVHPDLVRVYTELRAFRTGSPPADARVTTVASLAALADSPLTSATPRSNAGTGGL

SEQ ID NO: 180 - DNA, 753 bp, Micromonospora carbonacea africana
atgaccgggcacagcgccgtcgcgctggacgtcggcggggtcgtctactacgacgagccgttcgagctggcctggctccaggacaccttcgaccgcctccaggccaccgacccgacgctcgacctgcgtgcgtttctggagcacgtcgagcggttctaccactacggcgagggcgacccaaccggccggacctggctccactcggaggccgccgcgctgagctggtcgcgggtccggcagtcctggggcgagctggcccaggagattcccggtgccgttcgcgcggtcaccaggctggccagggaactacccgtcgtgatcgtcgccaaccagccccccgagtgcgcggacgtactggcccggtggcaggtcagccaggtctgccgggaggtgctcctcgactccctcgtcggggtggccaagcccgacccggccctgctcgggctcgccctgcggcggctggcgatcccgcccgccgagttgctggtggtgggcaaccggacggatcacgacgtcctgcccgcgctcgggctcggttgcccggtggcgttcgtgctgcccgatccggcgtaccgccggccgccgggcgtccatccggacctggtccgggtctacacggagctgagggcgttccgcaccggctccccgcccgcggacgcccgggtcaccaccgtggcgtccctggcggccctggccgactctcccctgacgagtgccaccccgcgttcgaacgccggcaccggcggactttga

SEQ ID NO: 181 - protein, 1284 aa, Streptomyces mobaraensis
MTNTGNDERNTPVTPLAHPADSLPPVAVVGIGCRFPGGVESPDGFWDLLAAGRNTVGDMPTDRWEEYRDFGPRFDAALRKAIRAGSYLDGDIAGFDAEFFGISPREAELMDPQQRLMLEVSWQALEHAGIAPHTLAGTDTGVFAGVCTYDYGAGRLEDLPGIDAWTGIGAAVCAVSNRVSHALDLRGPSLSIDTACSASLVALHTAAQSLRLGECSVALAGGVNLLVSPGQTIALGTAGALAPDGRSKPFSASADGYGRGEGCGVLVLKLLADAERDGDRVLAVLRGSAVNQDGRTNGIMAPCGQAQEHVMRRALAAAGVDAGTVDFVEAHGTGTRLGDPMEIGAIGAVYGADRAGGEPCVVGSVKSNIGHLEGAAGVAGVIKAVLALGRDHIPATLLDGDPNPEIDWDGHAIRLATGAVPWPERPHPRRAAVSGFGYGGTVAHVVLEQAPPTPARPAPEPAGTVFPLSAASPEALRAGAGALAERVEAGLDPAALGHTLAHRRSPLAHRAAVVAADRGELAAGLRALAAGEPAPGVVTGAALPDTARPVWVFSGHGSQWAGMGRELLESEPVFAAAIDELEPVFKEEIGFSPRQTLLEGDHTEVHRAQTMIFAMQLGLAALWRSRGVEPAAVIGHSVGEIAAAVTAGVLTTADGARLICRRSLLLREAAGRGAMAMVNLPFDEVAERLAGNGAVVAAIASSTSSTVVSGDPEAVDEVVGRWTDEGLVVRRVASDVAFHSPHMDPLLDRLRAACAELRPGTPHTPLYTTALADPRAAMAADGAYWAANLRNPVRLAAAVTAAAEDGHRAFVELAPHPVVAHSVHETLAERGVEDVFVGTTLRRDKPEARTFDAAVGAAHCHGVTVDWPALQPNGDLATLPPYPWQHRSLWRSIAGSRTAGRGHDVASHTLLGTPAAVAGSELRLWHSTLDDDSRPYPGSHALNGVEIVPAAVLAVTFLTAAAEDGEPRALRDMTMTHPVLTAGQRQIQVVHEGDVVRLASRTVADASEPNPAWLVHCASGTAAPDLAALASRTLLDPAEHRLEPADPGLVARRLAEVGVPSTGFDWTVESLSAGFGVLHARVASPETGSWAPLLDAVMSIAPAAFMGLPQLRMVVQVDEITVHGTPPDAATVEVVLDPGVTDTVHALVTDGDGRPVASLRGLRYPVVEQPAAPAADEPGREADADAVSFAGLAPDELRQRVLDEVRAQIAQEMRLAPADLHVRRPLVEQGLDSVMTVVVRRRLEKRVGRDVPANVFWKLPTIRDIADHLTERLAEVPAEDVPAS

SEQ ID NO: 182 - DNA, 3855 bp, Streptomyces mobaraensis
atgacgaataccggcaacgacgaacggaacacgcccgtgacacccctcgcacacccggcagactcccttcccccggtggccgtggtcgggatcggctgccggttccccggcggcgtcgaatcccccgacgggttctgggacctgctggcggccggccgcaacaccgtcggcgacatgcccaccgaccgctgggaggagtaccgggacttcggcccgcgcttcgacgcggcgctgcggaaggccatccgcgccggcagctacctggacggcgacatcgcgggcttcgacgccgagttcttcggtatctccccgcgcgaggccgagctgatggacccgcagcagcgcctcatgctggaggtgtcctggcaggcgctggagcacgcgggcatcgcgccgcacaccctggcggggaccgacaccggtgtgttcgccggcgtctgcacctacgactacggcgccggccggctggaggacctgccgggcatcgacgcctggacggggatcggcgcggcggtgtgcgccgtgtcgaaccgcgtctcgcacgcgctcgacctgcgcggacccagcctctccatcgacaccgcctgctccgcctccctggtggcgctgcacaccgccgcgcagagcctgcggctcggcgagtgctccgtggcgctggccggcggcgtcaacctgctggtgtcgcccggccagacgatcgccctgggcacggccggcgcactggcgcccgacggccgcagcaagccgttctccgcgtccgccgacggctacggccggggcgagggctgcggcgtgctggtcctcaagctgctggcggacgccgaacgcgacggcgaccgggtgctggcggtgctgcgcggcagcgcggtcaaccaggacgggcgcaccaacggcatcatggccccctgcggtcaggcccaggagcacgtcatgcggcgtgccctggcggccgcgggcgtcgacgccggcaccgtcgacttcgtggaggcccacggcaccggcacccgcctcggcgaccccatggagatcggcgcgatcggcgccgtctacggagcggaccgcgccggcggcgagccgtgcgtggtcgggtcggtgaagtccaacatcggccacctggaaggcgccgcgggcgtcgccggggtcatcaaggccgtcctcgccctggggcgtgaccacatcccggccaccctgctggacggcgaccccaaccccgagatcgactgggacggccacgccatccggctggccaccggggccgtgccctggcccgagcgcccgcacccccgccgcgccgccgtctccggcttcggctacggcggcaccgtggcccacgtcgtcctggagcaggcgccccccacgcccgcccgtcccgcgccggagccggccgggaccgtgttcccgctctccgccgcctcccccgaggcgctccgcgcgggcgccggcgcgctcgccgagcgggtcgaggcgggcctggaccccgccgcgctcgggcacaccctggcccaccggcgttccccgctcgcccaccgggcggccgtcgtggcggccgaccgcggcgaactggccgccgggctgcgcgcgctggccgccggggagccggcgcccggcgtcgtcaccggggcggcgctgccggacaccgcccgtcccgtctgggtgttctcgggccacggctcccagtgggccgggatgggccgggaactgctggagtccgagccggtgttcgccgcggcgatcgacgagctggagccggtgttcaaggaggagatcgggttctcgccccggcagacgctgctggagggcgaccacaccgaggtccaccgcgcccagaccatgatcttcgcgatgcagctcggactcgccgcgctgtggcggtcccggggcgtcgagcccgccgccgtcatcggccactcggtcggcgagatcgccgccgccgtcaccgccggcgtactgaccacggccgacggggcccggctgatctgccgccggtcgctgctgctgcgcgaggccgccgggcgcggggcgatggccatggtgaacctgcccttcgacgaggtcgccgagcggctcgcggggaacggcgcggtcgtcgccgccatcgcgtcctcgacgtcgtccaccgtcgtctcgggcgacccggaggcggtcgacgaggtcgtcggccgctggaccgacgaggggctggtcgtccggcgggtcgcctccgacgtggccttccacagcccgcacatggacccgctgctcgaccggctccgcgcggcctgcgccgagctgcggccgggcaccccgcacacccccctctacacgacggcgctcgcggacccgcgggccgcgatggccgccgacggcgcgtactgggcggccaacctgcgcaacccggtgcggctcgccgcggcggtcaccgcggcggccgaggacggccaccgggcgttcgtcgagctggccccgcaccccgtggtcgcgcactcggtccacgagacgctggccgagcgcggcgtggaggacgtgttcgtcggcacgacgctgcggcgcgacaagcccgaggcgcggaccttcgacgcggccgtgggcgcggcccactgccacggcgtgaccgtggactggccggcgctccagccgaacggggacctggcgaccctgccgccgtacccctggcagcaccgctcgctctggcgctccatcgccgggtcgcggacggcaggacgcggccacgacgtcgcgtcccacaccctgctgggcacccccgcggccgtggccggcagcgaactgaggctgtggcacagcacgctggacgacgacagccgcccgtacccgggcagccacgccctcaatggcgtggagatcgtcccggccgccgtgctggcggtcacgttcctgaccgcggcggccgaggacggcgaaccccgcgccctgcgggacatgacgatgacccacccggtgctcacggccggtcagcggcagatccaggtcgtccacgagggcgacgtggtccggctggcctcccgtacggtcgcggacgcgtccgagccgaaccccgcctggctcgtccactgcgcgtccggcaccgccgcgccggatctcgccgccctggcgtcgcgcacgctgctggacccggccgagcaccggctcgaacccgccgatcccggcctggtcgcgcggcggctggccgaggtgggcgtgccctcgaccggtttcgactggaccgtggagagcctgtccgccggcttcggcgtgctgcacgcccgcgtcgcctcgccggagaccggttcctgggccccgctgctggacgccgtgatgtccatcgcgcccgccgccttcatgggcctcccccaactccgcatggtcgtccaggtggacgagatcaccgtccacggcacgcccccggacgcggcgacggtcgaggtcgtgctcgatcccggcgtcaccgacaccgtgcacgccctggtcaccgacggggacggccgcccggtggcgagcctgcgcggcctgcgctacccggtggtcgagcagccggccgcgccggccgccgacgagccgggccgggaggcggacgcggacgcggtgtcgttcgcgggcctggcgccggacgagctgcggcagcgggtgctcgacgaggtgcgcgcgcagatcgcgcaggagatgcggctggcccctgcggacctgcacgtccgccgcccgctggtggagcaggggctggactcggtgatgacggtggtcgtccgccgccggctggagaagcgcgtcggccgggacgtgcccgccaacgtcttctggaagctgcccaccatccgcgacatcgccgaccacctgaccgagcggctcgccgaggtcccggccgaggacgtcccggcgtcctga

SEQ ID NO: 183 - protein, 1267 aa, Micromonospora carbonacea aurantiaca
MFVEPKAIKPLAGASPSVAVIGIGCRFPGDVNSPDGFWDLLAGGHNTTGEVPASRWEPYRDLGPEFENAVRRANRSGSFLNEIDGFDADFFGISPREAELMDPQQRLLLEVAWQALEHAGIAPRELAGTDTGVFAGACTYDYGAHQLENLPYIDAWTGIGAAACALSNRVSHVLDLRGPSLTVDTACSASLVALHLAAQSLRLGESTVALVGGVNLIVSPGQSITLGAAGALAPDGRSKSFDATADGYGRGEGCGVVVLKLLADAERDGDRVLAVLHGSAVNQDGRTNGIMAPCGQAQEHVMERALRSGGIAPGSVDYVEAHGTGTPLGDPMEAAAIGAVYGHARADGEPCLIGSVKANIGHLEGAAGIAGVIKAVLALDRAEIPATPVVTDVDPAIAWDALNVRVVTRHQSWPDRGRPRRAGVSGFGYGGTVAHVVLGQAPPRTRRERSPLTGESLFPVSASSAASLGEQASALAGWLSRDADLASVGHTLAMRRSHLAYRAVAVAADADGLGAALRGLAAGEPVDGVVTGSPLGDPPKLLWVFSGHGSQWAGMGRELLVTEPAFAGVVDSLEAVFLEEIGFSPRQALLDGEFDAVDRIQTMIFVMQLGLAAMWRSRGVTPDAVIGHSVGEIAAAVTAGLLTVEDGGRLICRRSALLRRVAGQGAMAMVSLPFEEVAERLAGRSDVVAAIASSPSSTVVSGDPSALDALIAQWDAERLVTRRVASDVAFHSPHMDPLLDELTAAVDFTPHSPRIRVYSTALDDPRAAMTADGAYWAGNLRQPVRLAAAVTAAFADGFRAFVEVSPHPVVTHSIHETLGGSDDEAYVGVTLRRDQSEVRGFLTALAGMHCIGVPVDWTALHPSGELVTLPVYRWRHRSHWHYPAPVSRSGGRGHDPDSHTLLGARRSLAGSAVRVWETSLDDSNRPYPGSHSLNGVEIVPAAVLVVTFLAAAERDGVPPVLADVAMRHPLMTADLREIQVIQEADAVRLASRATGGDAGEDPPWLVHADATVADGAAAALTGRTLVDPEQYRLEPADPGSIHRRLAEVGVPSTGFGWSVDQLLSGYGVLRARVHTAETSTWASVLDAVMSIAPAAFPGIPQLRMVVQIDEVATSGPPPETVLVEVRLDEDRPDTVDALVATADGRVLAALPGLRYPVIDEPPAPAGTEEASPAEPAMSLADLPPAELRERVLEEVRLQIATEMRLAVDDLHPRRPLADQGLDSVMTVVIRRRLEKRLGLGLPTTVFWQQPTVTAIADHVTGLLSSKS

SEQ ID NO: 184 - DNA, 3804 bp, Micromonospora carbonacea aurantiaca
atgttcgtggaaccgaaagcaatcaagccgctcgcgggggcctctccatcggtcgcggtcatcggcatcggttgccggttccccggcgacgtcaattccccggacggcttctgggacctgctcgccggcgggcacaacaccaccggcgaagtgccggccagccgatgggagccgtaccgggacctggggcccgagttcgagaacgccgtacgccgggctaaccgttcgggcagcttcctgaatgagatcgacggcttcgatgccgacttcttcggcatctcgccacgcgaggccgagctgatggatccccagcaacgactgctgctggaggtggcctggcaggccctggaacacgcgggcatcgcaccgcgcgagctggccggcacggacaccggtgtcttcgccggtgcctgcacctacgactacggtgcccaccagctcgagaacctcccgtacatcgacgcctggaccgggatcggcgccgccgcctgcgcgctctccaaccgcgtctcccacgtcctggacctgcgggggccgagtctcaccgtggacaccgcgtgttcggcctcgctggtggccctgcacctcgccgcgcagagcctgcggctgggcgagagcacggtggctctggtcggcggcgtcaatctcatcgtctccccaggccagtccatcactctcggcgccgcgggtgcgctggccccggacgggcggagcaagtccttcgacgccaccgccgacgggtacggccgcggcgagggctgcggcgtcgtcgtgctgaagctcctcgccgatgccgagcgcgacggagaccgggtgttggcggtgctgcacggcagcgccgtgaaccaggacggtcgcaccaacgggatcatggccccgtgcgggcaggcccaggagcacgtgatggaacgggccctgcgcagcggcgggatagcgcccggctcggtcgactacgtcgaggcgcacggcacgggcaccccgctcggcgacccgatggaggccgccgcgatcggtgccgtgtacgggcacgctcgcgccgacggcgagccctgcctgatcggttcggtcaaggccaacatcggccatctggaaggcgccgcgggcatcgccggagtgatcaaggcggtgctcgccctggaccgcgccgagataccggccaccccggtcgtcaccgacgtcgatccggccatcgcctgggacgcgctgaacgtccgcgtggtgacccgtcaccagtcctggcccgatcgcgggagaccgcgccgggccggcgtgtccggcttcgggtacggcgggacggtggcccacgtcgtgctcgggcaggccccaccgcgcacgcgacgggagcgcagcccgctgaccggtgagtccctgttcccggtctccgcgtcctcggcggcgtcgttgggcgagcaggcgtcggcgctcgccggctggctctcccgggacgccgacctggcctccgtgggacacaccctggcgatgcggcgttcgcatctcgcgtaccgggcggtcgccgtggccgccgacgcggacggtctcggtgccgcgctacgcggcctggccgcgggcgaaccggtcgacggcgtggtcacgggatcgccgctcggggaccctccgaagctcctctgggtcttttccggccacggttcccagtgggcggggatgggccgggaactactcgtcaccgaaccggcgttcgcaggggtggtcgactccctggaagccgtcttcctggaggagatcggcttctcgccacggcaggcgttgctggacggtgagttcgacgcggtcgaccggatccagacgatgatcttcgtcatgcagctgggactggccgcgatgtggcggtcgcggggcgtgaccccggacgccgtcatcggccactccgtcggtgagatcgccgccgcggtcaccgccggcctgctgacggtggaggacggcggccggttgatctgccggcgatcggcgctcctgcgacgcgtcgcgggccagggcgcgatggccatggtgtcgttgccgttcgaggaggtcgccgagcggttggccggtcgcagcgacgtggtggcggccatcgcgtcgtcgccgtcgtcgacggtggtttccggcgatccctcggccctggatgcgctgatcgcccagtgggatgccgagcggctggtgacccgcagggtggcctccgacgtggcgttccacagcccgcacatggatccgctgctcgacgagctgaccgccgccgtcgacttcacgccgcacagcccgcggatccgggtctactccaccgccctggacgacccgcgtgcggcgatgacggccgacggggcctactgggccgggaacctgcgccagcccgtgcggctcgccgccgcggtcaccgcggcgttcgccgatggcttccgtgccttcgtggaggtgtcgccgcatccggtggtcacccactcgatccacgagacgttgggcggttccgacgacgaggcgtacgtcggcgtcacgcttcgccgcgatcagtccgaggtacgcggcttcctgaccgcactcgccgggatgcactgcatcggggtgcccgtcgactggacggccctgcacccgtcgggagaactggtcaccctgccggtctaccggtggcggcaccgcagccactggcactatcccgccccggtctcccggagcggggggcgcggccacgaccctgattcgcacaccctgctcggtgcgcggcgcagcctggcggggagcgcggtgcgggtgtgggagaccagcctggacgactccaaccggccctacccgggcagccacagcctcaacggcgtcgagatcgtgcccgccgccgtgctcgtggtgacgttcctggcggcggccgagcgggacggcgtgccaccggtcctggccgacgtggcgatgcggcacccgctgatgacggcggacctgcgggagatccaggtcatccaggaggccgacgccgtccggctcgcctcccgggccaccggcggggatgccggcgaggatccgccgtggctggtccacgccgacgcgaccgtggccgacggtgctgcggcggcgctcacgggacggaccctcgtggaccccgagcagtaccgactggagccggccgaccccgggtcgatccatcgccggctcgctgaggtgggtgtcccgtcgaccggtttcggttggtcggtggatcagctgctctccgggtacggtgtcctccgggcccgcgtccacaccgccgagacgtccacctgggcgtcggtgctggacgcggtgatgtcgatcgcgccggcggcgtttcccggcatcccgcagttgcggatggtggtgcagatcgacgaggtggcgacgagtggcccgccgcccgagaccgtcctcgtcgaggtgcggctcgacgaggaccgccccgacacggtggacgccctcgtggccaccgcggacggccgggtcctggccgcgctgcccggcctgcgctacccggtgatcgacgagccgcccgccccggccggcaccgaggaggcgagccccgcggagccggcgatgtccctggccgacctgccgccggccgagctgcgggaacgggtgctggaggaggttcgtctccagatcgcgaccgagatgcggctcgcggtggacgacctgcatccgaggcgcccgctcgcggatcagggcctggactccgtgatgacggtggtgatccggcgtcggctggagaaacgactcgggctgggcctacccaccaccgtcttctggcagcaacccaccgtgacggccatcgccgaccacgtgaccgggctgctctcgtcgaagagctag

SEQ ID NO: 185 - protein, 1266 aa, Micromonospora carbonacea africana
MIVEAEKDRLRPVASEAVAVVGIGCRFPGDVNSPDEFWDLLTGGRNTTGTVPEERWSAYRDLGPAFESALRSATRAGNFLADISGFDADFFGISPREAELMDPQQRLMLEVTWQALEDAGIPPRTLAGTDVGVFAGVCTYDYGGHQLEDLPHIDAWTGIGAATCAVANRVSHVLDLRGPSLSIDTACSASLVALHLAAQSLRLGESTLALAGGVNLIVTPGQSITLGSAGALAPDGRSKSFDATADGYGRGEGCGVLVLKLLSDAQRDGDRVLAVLRGSAVNQDGRTNGIMAPCGQAQEHVMVRALRSAGIEAGSVDYIEAHGTGTPLGDPMEAAAIGSVYGQDRPDDEPCLIGSVKSNIGHLEGAAGVAGVIKAVLALNRAEVPATLLVTEVNPDIEWKRLRLRLVTRNQPWPDRPGPRRAGVSGFGYGGTVAHVVLEQAPPVAAEPAPALTGETLFPISAGSAHSLRERARALAGIVPDVDLAALGHTLARRRSHLTHRAVAVAAGRDDLVAAFAALADDRPHDRVRTGSPVAEPPRTVWVFSGHGSQWTGMGRELLATEPAFADAIDRIEQIFLDEIGFSPRQAILDGDYEAVDRTQTMIFAMQLGLAEMWRARGVEPDAVIGHSVGEIAAAVTAGILTVADGARLICRRSLLLREVAGQGAMALVTLPFEEVAARLAGRVDVVAAIASSPSSTVVSGDPAALDALVAEWTEEGLGVRRVASDVAFHSPHMDPLLDRLRAAVDFTARAPRVPIYSTALADPRAPITADGEYWAANLRNPVRLAAAVAAAVSDGHRAFIEVSPHPVVTHSIHETLAGSLDDEVFVGGTLRRDTPEAQAFLSSLGAAHCHGVAVDWGRVHPSGPLVTLPGYPWRHRSHWHWPTPAAATGRGHDPASHTLLGAVDNVAGSDVRVWRTALDDASRPYPGSHALNGVEIVPAAVLVETLMAAAGRGDGRPLLTGLSMRYPLMTAGLHEVQVVRDGAEVRLASRSVDAEADPSRDWLIHTDATVADADATVLAARALADPDDHRMEPGDPGSIHRRLAEVGVPSTGFDWSVEELLSGYGVLRARVRSADSSTWAPVLDAVMSVAPAVFPGVPQLRMVVYVDEVLLTGEPPEVTLIEVALDPDRPDTANALVADAQGRVVASLPGLRYPVIDQPVAPAQDSSGEVEEAVSFAGLSDEELHERVFDEVRRQIAGEMRLDADDLHPRRPLAEQGLDSVMTVVIRRRLEKRTGRSLSPTVFWQRPTVAAIADHLVELLSTPQE

SEQ ID NO: 186 - DNA, 3801 bp, Micromonospora carbonacea africana
atgattgtggaagcagagaaggaccggttgcgtccggtggcgtccgaggcggtcgccgtggtggggatcggctgccggttcccgggcgacgtcaactcgcccgacgagttctgggacctgctcaccgggggtcgcaacaccaccgggacggtgcccgaggagcgctggagcgcgtaccgcgacctgggtccggcgttcgagtccgcgctccggtcggccacccgggcgggcaacttcctggccgacatctccggcttcgacgcggacttcttcggcatctccccgcgcgaggccgagctgatggacccgcagcagcggctcatgctggaggtgacctggcaggcgctggaggacgccgggatcccgccccgcaccctggccggcaccgacgtcggcgtcttcgccggcgtgtgcacctacgactacggcggccaccagttggaggacctgccgcacatcgacgcctggacgggcatcggcgccgccacctgcgccgtcgccaaccgggtctcccacgtgctcgacctgcgcgggccgagcctgtcgatcgacaccgcctgctcggcgtcgctggtcgcgttgcacctcgccgcgcagagcctgcggctgggcgagagcacgctggccctcgccggcggggtcaacctgatcgtcacgcccgggcagtcgatcaccctcggctcggccggtgccctggcacccgacgggcgcagcaagtccttcgacgccaccgccgacggctacggtcgtggcgaggggtgcggcgtcctcgtgctcaagctgctctccgacgcccagcgggacggggaccgggtgctggccgtgctgcggggcagcgccgtcaaccaggacggccggaccaacgggatcatggcaccgtgcggccaggcccaggagcacgtgatggtccgcgccctgcgctcggccggcatcgaggccggcagcgtcgactacatcgaggcgcacggcaccggcaccccgctcggtgacccgatggaggccgcggcgatcggctcggtctacgggcaggaccgcccggacgacgagccctgcctgatcggttcggtcaagtccaacatcggccacctggagggcgcggccggcgtcgcaggcgtcatcaaggcggtcctggcgctgaaccgggccgaggtgcccgccaccctgctggtcaccgaggtcaacccggacatcgagtggaagcggctgcggctgcgcctggtcacccgcaaccagccctggccggaccggccggggccgcgccgcgccggagtctccggcttcggctacggcggcaccgtggcgcacgtggtgctggaacaggccccgccggtcgccgccgagccggccccggcgctgaccggcgagacgctgttcccgatctccgccggctccgcgcactcccttcgcgagcgggcccgcgccctggccgggatcgtcccggatgtcgacctcgccgcgctcgggcacaccctggctcggcggcgttcgcacctgacccaccgggcggtggcggtggccgccggccgggacgacctggtcgcggcgttcgcggcgctcgccgacgacaggccgcacgaccgggtgcgtaccggaagcccggtggcggagccgccccgcacggtgtgggtgttctccgggcacgggtcgcagtggacgggcatggggcgggaactgctggccacggagccggccttcgcggacgcgatcgaccgcatcgagcagatcttcctcgacgagatcggtttctcaccccgccaggcgatcctcgacggcgactacgaggccgtcgaccggacccagacaatgatcttcgcgatgcagctcggcctggccgagatgtggcgagcgaggggagtcgagccggacgcggtgatcggccactcggtcggagagatcgccgcggcggtgaccgccggcatcctgaccgtggccgacggcgcacggctgatctgccgtcgttccctgctgctgcgcgaggtcgccggccagggcgcgatggccctggtgacgctgcccttcgaggaggtcgcggccaggctggccggccgcgtcgacgtggtcgccgcgatcgcctcctccccctcgtcgaccgtggtctccggcgacccggccgcgctggacgcgctggtcgccgagtggaccgaggagggcctgggcgtacgccgggtcgcctccgacgtggccttccacagcccgcacatggatccgctgctcgaccggctgcgcgccgccgtcgacttcaccgcccgcgcaccccgggtgccgatctacagcacggcgctggccgacccgcgggccccgatcaccgccgacggcgagtactgggccgcgaatctgcgcaacccggtccggctcgccgcagcggtggccgccgccgtctccgacggacaccgggccttcatcgaggtctccccgcacccggtggtgacccactcgatccacgagacgctggccggaagcctcgacgacgaggtcttcgtcggcggcaccctgcgccgcgacaccccggaggcgcaggccttcctgtccagcctgggggccgcgcactgccacggggtcgcggtcgactggggccgggtgcatccgtccgggccgctggtcaccctgcccggctacccctggcggcaccggagtcactggcactggccgacgccggccgccgccacgggccggggccacgaccccgcgtcgcacaccctgctcggcgcggtcgacaacgtggcgggcagcgacgtgcgggtgtggcgcaccgcactcgacgacgccagccgcccgtacccgggcagccacgccctcaacggcgtggagatcgttccggcggccgtgctggtggagaccctcatggctgccgccgggcggggcgacggccggccgctgctgaccggcttgtcgatgcggtacccgctgatgaccgccgggctgcacgaggtccaggtggtgcgggacggtgccgaggtgcggctggcgtcccgttccgtcgacgcggaggccgacccgagccgggactggctgatccacaccgacgccacggtggccgacgccgacgccacggtgctcgccgcgcgggcgttggccgaccccgacgaccaccggatggaaccgggcgacccgggctccatccaccgccggctcgccgaggtcggggtgccgtcgacgggattcgactggtcggtggaggagctgctctccgggtacggcgtgctccgcgcgcgggtgcgctcggccgactcgtccacctgggcgccggtgctggacgccgtcatgtcggtcgcccccgccgtcttccccggcgtgccgcagctacgcatggtggtgtacgtcgacgaggtgctgctcaccggcgagccaccggaggtgacgctgatcgaggtcgccctcgacccagaccggcccgacacggcgaacgcgctggtcgcggatgctcagggccgggtcgtggccagccttcccgggctgcgctacccggtgatcgaccagccggtcgccccggcgcaggacagttccggcgaggtggaggaggcggtctccttcgccggcctgtccgacgaggaactgcacgagcgggtgttcgacgaggtgcgccggcagatcgccggggagatgcgactcgacgccgacgacctgcatccccgccggccgctggccgagcagggcctcgactcggtgatgacggtggtgatccggcgacgcctggagaagcgcaccgggcggagcctctccccgaccgtcttctggcagcggcccaccgtcgccgccatcgccgaccacctggtggagctgttgagcaccccgcaggagtga

SEQ ID NO: 187 - protein, 158 aa, Streptomyces mobaraensis
VWDAGIHPICSNNPISENGGFHLYKSPLLAVLNLWVEMDPPPAPGSAGRSSLSALARVRLRHSTLLGTLPLREYQVTTAPMTLSTLDAKIMERIAAGERTTCIANKLYLSRQGVEYHVSKMMDRFRVPNRTALVAKAYALGILGSEAWPPRVLQDRIN

SEQ ID NO: 188 - DNA, 477 bp, Streptomyces mobaraensis
gtgtgggatgccggaatacatcccatttgctcgaacaatccaatatcggagaacggcggcttccacttgtacaaaagtccactactcgccgtgttgaacttgtgggtagaaatggacccgccgccggccccggggtccgccgggcgctcttccctctcagcgcttgcccgggtccgtcttcggcactccacccttctcggcactcttcccctcagggagtaccaggtgaccactgcacccatgacgttatccacgctggacgccaagatcatggagcgcatcgccgcaggtgagcgcaccacgtgcatcgcaaacaagctctacctcagccggcagggtgtcgagtatcacgtcagtaagatgatggaccgcttccgggtgcccaaccgcaccgcgctcgtcgccaaggcgtacgcgctgggaatcctgggatcggaggcgtggccccccagggttctgcaggatcgcatcaattga

SEQ ID NO: 189 - protein, 82 aa, Micromonospora carbonacea aurantiaca
VGLKLPLSELDARIIESIAAGERTVHIANKVYLSRQGVEYHVSKLLQRLRVPNRPALIAKVYSMGILSVGTWPPEVCRERLD

SEQ ID NO: 190 - DNA, 249 bp, Micromonospora carbonacea aurantiaca
gtgggtctgaagcttcccctctccgagttggatgcccgcatcatcgaaagcatcgcagcgggtgagcgcaccgtgcatatcgcgaacaaggtctacctgagccgccagggcgtcgaataccacgtcagcaagttgttgcagcggctacgtgtgcccaatcggcccgcgctcatcgccaaggtgtactcgatgggcatcctttcggtggggacctggcccccggaggtttgccgggaaaggctcgactga

SEQ ID NO: 191 - protein, 82 aa, Micromonospora carbonacea africana
VNLKFSLSDLDARIIESIAAGERTVHIANKVYLSRQGVEYHVSKLLQNLRVPNRPALIAKAYAMGILAAGTWPPTVSKDEAA

SEQ ID NO: 192 - DNA, 249 bp, Micromonospora carbonacea africana
gtgaatctcaagttctcactgtccgatctggacgcgcgcatcatcgaaagcatcgccgcaggcgaacggacggtgcatatcgccaacaaggtctacctcagccgtcagggcgtcgagtaccacgtcagcaagctgttgcagaacctgcgagtgcccaaccggccggccctgatcgcgaaggcgtacgcgatgggcatcctcgcggcgggcacctggccgccgaccgtcagcaaggacgaagcggcctga

SEQ ID NO: 193 - protein, 396 aa, Streptomyces mobaraensis
MTQPPPSPTMCVLPWIHMCASIDGVYGRCCVDDSMYHNELYESVDEPVFKLNADAVGCAPNSRYAKDNPDEVRGLTEAFNSPNMRRTRLKMLAGERVSACDYCYHREDRGATSYRQSINERFADTVDFADLAERTAPDGSFDEFPFFLDIRFGNTCNLRCVMCAYPVSSGWGAKKRPSWSSAVIDPYREDEELWATLRENAHLIRRLYFAGGEPFMQPGHFAMLDLLIETGNAGNVDIVYNSNLTVLPEKVFDRFPHFKSVGIGASCDGVGEVFERIRQPAKWDVFVANVRRAKTEVNLWLQVAPQRLNLWGLRDLLHFAREEGLDADLANVVQWPDDYSVANLPDEEKRRATVELADLAEWCDSLDWAKPAKHLRALSAFMNAADPSQLISEGGA

SEQ ID NO: 194 - DNA, 1191 bp, Streptomyces mobaraensis
atgacccagcccccgcccagccccaccatgtgcgtgctgccgtggatccacatgtgcgcctccatcgacggcgtctacggccggtgctgcgtggacgactccatgtaccacaacgagctgtacgagtccgtggacgagccggtcttcaagctcaacgccgacgccgtcggctgcgcgcccaactcccgctacgccaaggacaacccggacgaggtacgcgggctgacggaggcgttcaacagccccaacatgcggcgcacccggctgaagatgctggccggcgagcgggtgtccgcgtgcgactactgctaccaccgcgaggaccggggcgcgacctcgtaccggcagagcatcaacgagcggttcgccgacacggtggacttcgccgacctggccgaacggaccgcccccgacggctcgttcgacgagttcccgttcttcctggacatccggttcggcaacacctgcaacctgcggtgcgtgatgtgcgcctacccggtcagctccggctggggcgccaagaagcggccgtcgtggtcgtccgcggtgatcgacccgtaccgcgaggacgaggagctgtgggcgacgctccgcgagaacgcccacctcatccgccggctgtacttcgccggcggtgaaccgttcatgcagccgggccacttcgcgatgctcgacctgctgatcgagaccggcaacgcgggcaacgtcgacatcgtctacaactccaacctcacggtgctcccggagaaggtcttcgaccgcttcccgcacttcaagagcgtcgggatcggcgcctcctgcgacggcgtcggcgaggtcttcgagcgcatccggcagcccgcgaaatgggacgtgttcgtcgccaacgtccgccgggccaagaccgaggtgaacctctggctccaggtcgcgccccagcggctcaacctgtgggggctgcgggacctgctgcacttcgcccgcgaggagggcctcgacgcggacctcgccaacgtcgtgcagtggcccgacgactactccgtcgccaacctcccggacgaggagaagcggcgggcgaccgtcgagctggccgacctggccgagtggtgcgacagcctggactgggccaagcccgccaagcacctgcgggcgctgagcgcgttcatgaacgccgccgacccgtcccaactgatctccgaaggaggagcatga

SEQ ID NO: 195 - protein, 405 aa, Micromonospora carbonacea aurantiaca
MSVPGDSHATPSPTADQTACVLPWIHLCASIDGVYGRCCVDDSMYHTELYDEQEEPAFALNDDAIGCSPGSRYAKDNPDRVMGIREAFNSPNMKRTRLAMLGGERVEACKYCYFREDHGAQSYRQNVNRRFHQEYDLDALAARTAADGTVEEFPFFLDIRFGNLCNLRCVMCTYPVSSSWGAKQRPSWSSAVIDPYRDDDELWATLRENAHLIRKLYFAGGEPFLQPGHFAMLELLVETGNAHNVDIQYNSNLTVSPDNAIKLLRHFKSVGIGASCDGVGEVFEYIRAGGKWADFVANLRLLRSDFDVWLQVSPQRHNLWDLRNVLEFARTEGLEVDLANVVQWPQDLSVASLSAEEKARATQELTDLIAWCAELGWDKPATHLDALRSFMNSLDPTRLVDDGVS

SEQ ID NO: 196 - DNA, 1218 bp, Micromonospora carbonacea aurantiaca
atgagcgttccgggcgacagccacgccaccccgtccccgacggccgatcagaccgcgtgtgtgctgccgtggatccacctctgcgcctccatcgacggcgtctacggccggtgctgcgtcgacgactcgatgtaccacacggagctgtacgacgagcaggaggagccggcgttcgcgctgaacgacgacgcgatcggttgctccccgggctcgcggtacgccaaggacaacccggaccgcgtgatgggcatccgggaggccttcaacagccccaacatgaagcggacccggctggcgatgctcggtggcgagcgcgtggaggcgtgcaagtactgctacttccgggaggaccacggcgcccagtcctaccggcagaacgtcaaccgccggttccaccaggagtacgacctcgatgcgctcgccgcccgtaccgccgcggacggcacggtcgaggagttcccgttctttctcgacatcaggttcggcaacctctgcaacctgcggtgcgtcatgtgcacctacccggtgagttcctcctggggcgccaagcaacgcccgtcgtggtcgtccgcggtcatcgacccgtaccgcgacgacgacgagttgtgggcgacgctgcgggagaatgcgcacctgatccgcaagctgtacttcgcgggcggcgaacccttcctgcaaccgggtcatttcgccatgctcgagctgctcgtggaaaccgggaacgcgcacaacgtcgacatccagtacaactcgaacctgaccgtctccccggacaacgcgataaagctcctacggcacttcaagagcgtgggcatcggggcttcctgcgacggcgtcggcgaggtgttcgaatacatccgggccggcgggaagtgggcggacttcgtggccaatctgcgcctgctccggtccgacttcgacgtctggctccaggtgtccccgcagcggcacaacctgtgggacctgcgcaacgtgctcgagttcgcgcgtaccgaggggctggaggtggacctggccaacgtggtgcagtggccgcaggatctctcggtcgccagcctgtcggccgaggagaaggcgcgcgccacccaggagctgacggacctgatcgcctggtgcgccgagctcggctgggacaagcccgcgacccatctcgacgccctgcgttcgttcatgaactcgctcgatccgacccgcctggtggacgacggggtgtcctga

SEQ ID NO: 197 - protein, 397 aa, Micromonospora carbonacea africana
MTDPEARSRTMCVLPWIHLCASIDGVYGRCCVDDSMYHNKLYEQEEEPEFLLNDDAVGCSPRSRYAADNPGRVMGLADAFNSPNMRRTRLAMLAGERVDACSYCYHREDHGALSYRQEINQRFRDIADPDRLAARTAPDGTVEDFPFFLDIRFGNTCNLRCVMCAYPVSSGWGAKKRPAWSSAVIDAYRDDDELWQTLRENAHLIRRLYFAGGEPFMQPGHFALLDLLVETGNAGNVDVVYNSNLTVLPESVFDRFRHFKSIGIGASCDGYGEVFERIRQGAKWETFIANVRRARSEVNLWLQVAPQRDNVWGLRDLLEFARAEGLDVDLANVVQWPAEMSVLSLPEEDKVRATGELTSLIDWCAGLGWEKPAADLRALRTFMNSADPVDLPPEIAA

SEQ ID NO: 198 - DNA, 1194 bp, Micromonospora carbonacea africana
atgactgacccggaagcccggtcccggaccatgtgcgtgctgccctggatccatctctgcgcgtccatcgacggtgtctacgggcggtgctgcgtggacgactcgatgtaccacaacaagctgtacgagcaggaggaggagccggagttcctgctcaacgacgacgccgtcggctgctcgccgcggtcccgctacgcggcggacaaccccggccgggtgatgggcctggcggacgccttcaacagccccaacatgcgccggacccggctggcgatgctggccggggagcgggtcgacgcctgctcctactgctaccaccgcgaggaccacggcgcgctgtcgtaccggcaggagatcaaccagcggttccgggacatcgccgaccccgaccggctggccgcccgcaccgcgcccgacggcaccgtcgaggacttcccgttcttcctcgacatccggttcggcaacacctgcaacctgcggtgcgtgatgtgcgcgtacccggtcagctcgggctggggcgccaagaagcggccggcctggtcgtccgcggtcatcgacgcctaccgggacgacgacgagctgtggcagaccctgcgcgagaacgcccacctcatccggcggctgtacttcgccggtggggagccgttcatgcagccgggccacttcgccctgctcgacctgctggtggagacgggtaacgccggcaacgtcgacgtcgtctacaactccaacctcaccgtgttgccggagtcggtcttcgaccggttccggcacttcaagagcatcggcatcggcgcctcctgcgacggctacggcgaggtgttcgagcggatccggcagggcgcgaagtgggagaccttcatcgcgaacgtccgccgggcccgctcggaggtcaacctctggctccaggtggcaccccagcgggacaacgtctgggggctgcgcgacctgctggagttcgcccgggccgaggggctcgacgtggacctggccaacgtggtgcagtggccggccgagatgtcggtgctcagcctgcccgaggaggacaaggttcgggccaccggggagctgacctccctcatcgattggtgcgccgggctgggctgggagaagcccgccgccgacctgcgggccctgcggaccttcatgaactcggccgacccggtggacctgccgcccgagatcgcggcctga

SEQ ID NO: 199 - protein, 136 aa, Streptomyces mobaraensis
MKIEVLQPTCNLDTVRDGRGGIFTWVPPEPILEFNMLHLYPGKVRGLHYHPHFVEYLLFVEGSGVLVTKDDADDPNCEEEFIHVSRGICTRTPAGIMHAVHAITPLTFIAMLTKPWDECDPPLVQVEPLPHTLERR

SEQ ID NO: 200 - DNA, 411 bp, Streptomyces mobaraensis
atgaaaatcgaggtgctccaaccgacctgcaacctggacacggtgcgggacggtcgcggcggaattttcacctgggttcccccggagcccatcctggaattcaatatgctgcacctgtacccgggaaaggtgcgcggtctgcactaccacccgcacttcgtcgaatacctgctcttcgtcgagggctcgggcgtgctggtcaccaaggacgacgccgacgacccgaactgcgaggaagagttcatccacgtctcgcgcggcatctgcaccaggacgcccgcggggatcatgcacgccgtccacgccatcacgccgctgacgttcatcgccatgctcaccaagccctgggacgagtgcgacccgccgctggtccaggtcgagccgctgccgcacaccctggagcgcaggtga

SEQ ID NO: 201 - protein, 137 aa, Micromonospora carbonacea aurantiaca
VKIEVLQPSCNLDTVRDGRGGIFTWVPPEPILEFNLITMHPGKVRGLHYHPHFVEYLLFVDGEGVLVTKDDPDDPDCPEEFIHVARGTCTRTPSGVMHAVYSITSLSFVAMLTRPWDECDPPIVQVQPLPHTLAANG

SEQ ID NO: 202 - DNA, 414 bp, Micromonospora carbonacea aurantiaca
gtgaagatcgaggtcctgcagccgagctgcaacctggacaccgtccgggacggccggggcggcatcttcacctgggtgccaccagagccgatcctggagttcaacctcatcaccatgcaccccggcaaggtccgtgggctgcactaccacccgcacttcgtggaatacctgctgttcgtcgacggggagggggtgctggtgaccaaggacgatccggacgaccccgactgcccggaggagttcatccacgtcgcccgggggacgtgtacgcgcacgccctccggagtgatgcacgcggtctactcgatcacgtcgctgtccttcgtggccatgttgacccgaccgtgggacgagtgtgatccgcccatcgtccaggtgcagccgctgccgcacaccctcgcggcgaacggctga

SEQ ID NO: 203 - protein, 343 aa, Streptomyces mobaraensis
MAGARVLIAGNFHWQAGFSQTVAAYVEAAGEAGCEVRVSGPLSRMDEQIPRHLPVEPDVRWGTHLVFMFEARQYLSDEQIELAGSIPRHRRLIIDFDGHWGGVATAGDSSVGTHPVEQWQRLYSTLGDLVLQPKAGPLPDGAEFFPCFGMPRLVRHPLELGRERDCDLQYIGSNWGRWEPFLEVVEAARRARLRRIRVCGRWWDGETCPGFEDITSAEPERLAGVDVRPPVPFGHVVTEMGRSVITPVLVSPLVADTGLLTARAFETLASGSLPVLPAAAEFMSFLYGGGAEPLMLGPDPAATLGRLAGEFERHAELVGRIQEQARARYNYPRLLGELLAFFR

SEQ ID NO: 204 - DNA, 1032 bp, Streptomyces mobaraensis
atggcgggagcccgggtgctcatagccgggaatttccattggcaggcggggttcagccagaccgtcgccgcctatgtggaagcggcgggtgaggcgggctgcgaggtccgggtcagcggtcccctttcgcgaatggacgagcagatcccgcgacacctgccggtggagccggacgtgcggtggggaacgcacctggtgttcatgttcgaggcccggcaatacctctccgacgagcagatcgaactcgccggctccattccccgccaccggcgcctgatcatcgatttcgacggccactggggcggtgtcgccaccgccggcgacagttccgtcggcacccacccggtcgagcagtggcagcggctctactccacgctcggcgatctcgtcctccagcccaaggcgggccccctgccggacggggcggagttcttcccgtgtttcggaatgccccgcctggtacggcaccccctggaactcggccgcgagcgggactgcgacctccagtacatcggcagcaactgggggcggtgggagccgttcctcgaggtcgtggaggccgcccggcgggcccggctgcggcggatccgggtctgcggacggtggtgggacggggagacctgccccgggttcgaggacatcacctccgccgagccggaacggctggccggcgtcgacgtccggccgccggtgccgttcgggcacgtcgtcacggagatgggccggtcggtgatcacgccggtgctggtcagcccgctcgtcgccgacaccgggctgctcacggcccgggccttcgagaccctcgcgtccggctcgctgccggtgctgccggccgcggcggaattcatgtccttcctgtacggcgggggagccgaacccctgatgctgggcccggaccccgccgcgacgctgggccggctggcgggcgagttcgagcggcacgcggaactcgtgggacggatccaggagcaggcgcgcgcccgctacaactaccctcggctgctgggggagttgctggccttcttccgctga

SEQ ID NO: 205 - protein, 350 aa, Micromonospora carbonacea aurantiaca
VTGPRILISGNFHWQAGFSHTVEGYVRAAGAAGCEVRVSGPLSRMDDQVPGLLPVEPDLGWGTHLVVMFEARQFLTPEQIELATRTFPRSRRLVVDFDLHWADEHPELGVDGTAGKYTAESWRSLYSELSDVMLQPKLTGKMAPGAEFFSCIGMPETVCHPLTLGRQRDYDLQYIGSNWWRWEPLTALVEAAVTLRPVPRMRVCGRFWDGATSPGFEDATTSVPGWLAERGVELCPPVAFGQVIPEMGRSLISPVLVRPLVAGTGLLTPRMFETLASGALPALSADAEFLAEVYGDECAPLLLGDDPATTLARLTTDFERHARIVGRIQDRVREEYGYPRVLRNLLAFFG

SEQ ID NO: 206 - DNA, 1053 bp, Micromonospora carbonacea aurantiaca
gtgaccgggccccgcatcctcatctccggcaacttccactggcaggccgggttcagtcacacggtggagggctacgtccgggccgccggcgcggcgggctgcgaggtccgggtcagcggcccgctgtcgcggatggacgaccaggtgcccgggctcctgcccgtcgagccggacctcggttggggcacccacctggtggtgatgttcgaggcccggcagttcctgacgcccgagcagatcgaactggcgacccgcacgttcccccggtcgcgccgcctggtcgtggacttcgacctgcactgggccgacgagcatccggaactgggcgtggacggcacggcgggcaagtacaccgccgagagctggcgctcgctctacagcgagctgagcgacgtgatgctacagccgaagctcaccgggaagatggccccgggagcggagttcttctcgtgcatcggcatgcccgagaccgtgtgccacccgttgactctcggccggcagcgggactacgacctgcagtacatcggcagcaactggtggcgttgggagccgctgacggccctggtggaggcggcggtgacgctgcgtcccgtgccgcgcatgcgggtctgcggccgtttctgggacggcgccacctctcccgggttcgaggacgcgaccacaagcgtcccgggctggctggcggaacgcggcgtcgagctctgcccgccggtggccttcgggcaggtgatcccggagatgggccggtcgctgatctcaccggtcctggtccgtcccctggtggcgggcacgggcctgctgacgccgcgcatgttcgagaccctggcgtcgggcgccctgccggctctctccgccgacgcggagttcctcgccgaggtctacggcgacgagtgcgcgcccctgctgctcggcgacgatccggccacgacgctcgcccgcctcaccacggacttcgagcggcatgcccggatcgtcggtcggatccaggaccgggtgcgggaggagtacggctacccccgcgtcctgcggaacctgctggccttcttcgggtag

SEQ ID NO: 207 - protein, 351 aa, Micromonospora carbonacea africana
MSRPRILVAGNFHWQAGFSQTVAAYVRAAREADCEVRLCGPLSRVDAETARHLPVEPDLRWGTHLVIMFEAKQFLTEAQLDLVEAFPRQRRAIVDFDGHWGAEEGGDGDSASGRYSAESWRRLYSTLSDLILQPRLGPLPAGARFFKCFGLAAPVRHPLELGTGAQSRPYDLQYIGSNWWRWEPMTEMVEAAAAARPPLRRLRVCGRWWDGGSCAGFEEATLSEPGWLRARGVEVHPPVPFGHVVEQMGRSLISPVLVRPLVTSTGLLTPRMFETLASGSLPVLPVAAKFLAPVYGDEAEHLMLGDDPAGTLSRLSAEHERYGRLVGEIQDRLRVEYGYPRVLRDLLDLLA

SEQ ID NO: 208 - DNA, 1056 bp, Micromonospora carbonacea africana
atgagcaggccacggattctcgtcgcgggcaacttccactggcaggccgggttcagccagaccgtcgccgcgtacgtgcgggcggcccgggaggccgactgcgaggtgcggctctgcggcccgctgtcccgggtcgacgccgagacggcccggcacctgccggtcgagccggacctccgctggggcacccacctggtgatcatgttcgaggccaagcagttcctcaccgaggcgcaactggacctcgtcgaggcgttcccccgacagcgccgggccatcgtcgacttcgacgggcactggggtgccgaggagggcggggacggcgacagcgcgtcgggccggtactccgcggagagttggcggcggttgtactcgaccctgagcgacctgatcctgcaaccccggctgggtccgctcccggccggcgcccggttcttcaagtgcttcggcctggcagcgccggtgcggcacccgctggaactgggcaccggcgcgcagtcgcgcccgtacgacctccagtacatcggcagcaactggtggcggtgggagccgatgaccgagatggtcgaggccgcggcggcggcccggccgccgctgcgccggctgcgggtgtgcggacgctggtgggacggcggcagttgcgcgggcttcgaggaggcgacgctcagcgagccgggctggctgcgggcgcgcggcgtcgaggtgcatccgcccgtgccgttcggccacgtggtcgagcagatgggccggtcgctgatctcaccggtcctggtgcggccgctggtcaccagcaccggcctgttgaccccccggatgttcgagacgctggcctcgggcagcctgcccgtgctcccggtcgccgcgaagttcctcgcgccggtctacggcgacgaggcggaacacctgatgctcggcgacgacccggccggaacgctgagccggctctcggccgagcacgaacggtacggacgactggtcggtgagattcaggaccggctccgcgtcgagtacggctaccctcgcgtcctgcgggacctgctcgatctgctggcctga

SEQ ID NO: 209 - protein, 375 aa, Micromonospora carbonacea aurantiaca
VNMTIRVWDYLPEYEKERADLLDAVETVFESGNLVLGRSVLGFETEFAAYHDVAHCVTVDNGTNAIKLALQALGVGPGDEVVTVANTAAPTVLAIDAVGAIPVFVDIRPDDYLMDTTQVADVITPATKALLPVHLYGQCVEMAPLQRLAREHGLLVLEDCAQSHGARHAGQLAGTMGDAAAFSFYPTKVLGAYGDGGAVLTGSETVDRDLRQLRYYGMESVYYVVQTPGHNSRLDEVQAEILRRKLRRLDEYIAGRRAVAERYAAGLGDIAEATGLVLPALADANEHVFYLYVVRHPQRDAILEQLKRRGITLNISYPWPVHTMTGFSKLGYAAGSLPVTERIADEIFSLPMYPSLPVDVQDTVIGALRDVLTTL

SEQ ID NO: 210 - DNA, 1128 bp, Micromonospora carbonacea aurantiaca
gtgaacatgaccatccgagtgtgggactacctgccggaatacgagaaggaacgggccgacctgctcgacgcggtggagacggtcttcgagtcgggcaacctcgtgctcggccgcagcgtgctcggcttcgagaccgagttcgccgcgtaccacgacgtggcgcactgcgtcacggtggacaacggcaccaacgcgatcaagctggccctgcaggcgttgggcgtggggcccggcgacgaggtggtcaccgtcgccaacacggcggcgccgaccgtgctggcgatcgacgccgtcggcgcgatcccggtcttcgtggacatccggccggacgactacctgatggacacgacccaggtggccgacgtgatcaccccggcgaccaaggctctgctgcccgtccacctctacggccagtgcgtggagatggcgccgttgcagcggctggcccgcgagcacgggctgctggtgctggaggactgcgcgcagtcgcacggcgcacgacacgcagggcaactcgccgggaccatgggcgacgcggcggccttctccttctatccgacgaaggtgctgggcgcctacggtgacggcggcgccgtgctcaccggtagtgagaccgtggaccgtgacctgcgccaactgcgctactacggcatggagagcgtgtactacgtcgtgcagacgcccggccacaacagccggctggacgaggtgcaggcggagattctccggcgcaagctgcgccggctcgacgagtacatcgccggccgccgcgcggtggccgagcgctacgccgccgggctgggcgacatcgccgaggcgaccgggctcgtcctgcccgccctcgccgacgccaacgaacacgtcttctacctctacgtcgtccgtcatccgcagcgggacgcgatcctggagcaactgaagcggcgtggaatcacgctgaacatcagttacccgtggccggtgcacaccatgaccggcttctcgaagctcggctatgccgccggatcgctgccggtcaccgagcggatcgccgacgagatcttctccctgcccatgtatccgtccctgccggtcgacgtgcaggacacggtgataggcgcattgcgcgacgtactcacgacgctctga

SEQ ID NO: 211 - protein, 373 aa, Micromonospora carbonacea africana
MTIRVWGYLPEYEKERDDLLDAVQTVFESGNLILGASVRGFEQEFAAYHDMPHCVTVDNGTNAIKLALQALDVGPGDEVITVSNTAAPTVLAIDAVGATPVFVDVRADDYLMDTELLAEAVTPRTKALLPVHLYGQCVDMDPVLRVAREHGLKVLEDCAQSHGARRGGRLAGTMGDAAAFSFYPTKVLGAYGDGGGVVTADAVIDERLRRLRYYGMEQVYYVVETPGHNCRLDEVQAEILRRKLCRLDDYIAGRRAVARRYEEGLADIADQVGLTLPVTATDNEHVWYVYVVRHPARDRILEQLAARDIALNISYPWPVHTMTGFAKLGYQTGSLPTTERLAGEIFSLPMYPSLPPETQDRVIDALRDVLAAL

SEQ ID NO: 212 - DNA, 1122 bp, Micromonospora carbonacea africana
atgaccatccgagtgtggggctacctgccggagtacgagaaggaacgggacgacctcctcgacgccgtgcagacggtcttcgagtccgggaacctcatcctcggcgcgagcgtgcgcggcttcgagcaggagttcgccgcctatcacgacatgccgcactgcgtcacggtggacaacggcaccaacgccatcaagctcgcactccaggcgctcgacgtcgggccgggcgacgaggtcatcaccgtctccaacacggccgcgccgacggtgctcgccatcgacgcggtcggcgcgacgccggtcttcgtggacgtccgcgccgacgactacctgatggacaccgagctgctggccgaggcggtcaccccccggacgaaggcgctgctgccggtgcacctctacggccagtgcgtcgacatggacccggtgctgcgggtggcccgggaacacggcctcaaggtcctggaggactgcgcgcagtcgcacggcgcgcgtcggggcggacggctggccggcacgatgggcgacgccgctgccttctcgttctatccgacgaaggtgctgggcgcgtacggcgacggcggcggcgtggtcaccgcggacgccgtgatcgacgagcggctgcggcggctgcgctactacggcatggaacaggtctactacgtcgtcgagacgccggggcacaactgccgcctcgacgaggtgcaggccgagatcctgcgccgcaagctgtgccggctcgacgactacatcgccgggcgccgcgccgtggcccggcgctacgaggagggcctggccgacatcgccgaccaggtcggcctgaccctgccggtgacggcgaccgacaacgaacacgtctggtacgtctacgtggtccgccaccccgcccgcgaccgcatcctcgaacagttggcggcgcgggacatcgcgctcaacatcagctacccctggccggtgcacaccatgaccggcttcgccaagctcggctaccagaccggctccctccccaccacggaacggttggccggcgagatcttctccctccccatgtatccctcgctgccgccggagacgcaggaccgggtgatcgacgcgctgcgcgacgtgctcgcggcgctctga

SEQ ID NO: 213 - protein, 369 aa, Micromonospora carbonacea aurantiaca
MTDRPLIAVLGASGFVGSAVLTALADRPVTVRAVSRRSAVAPEPAAADFEVVTADLTETGAVAAAVEGADAVINLVLNTAGWRSADGDGTAARVNLGVVRDLVEVARAGTGPRVVVFAGSASQVGRAQRMPVDGTEPDHPETGYDRQKAAAEALLDRASADGILRGVTLRLPTVFGPARPGGGDDRGVVSTMIRRALAGEPLTMWHDGTIQRELLYVDDAASAFVAALDHADALVCRHWPLGSRRGEPVGDLFRTIAALVAEETGRPPVPVVSVAPPASARQTDFHSLVVDASAFTAVTGWRAQVDLLHGLRRTVRSLSETRLDLGADLVPGEHPGRVGLGEGDRGPVPIRQDRLDVGGNGQAERVVER

SEQ ID NO: 214 - DNA, 1110 bp, Micromonospora carbonacea aurantiaca
atgacggaccgcccgctgatcgcggtgctcggcgcgtccggtttcgtgggctcggccgtcctgaccgcgctggccgaccgcccagtcaccgtccgggcggtgtcccgccgatccgctgtggcaccggagccggccgccgcggatttcgaggtggtcaccgccgacctcaccgagacaggcgcggtcgcggcggcggtcgagggcgcggatgccgtgatcaacctggtgctcaacaccgccgggtggcgcagcgccgacggcgacggcaccgcggcgcgggtgaacctcggcgtcgtccgtgacctggtcgaggttgcgcgggccgggaccgggccacgggtggtcgtcttcgccggctcggcgtcacaggtcggccgggcgcagcggatgcccgtcgacgggaccgaacccgaccacccggagaccggatacgaccggcagaaggcggccgccgaagcgctgctcgaccgggcctccgccgatggcatcctccgcggggtcacgctgcgcctgcccaccgtcttcgggccggcccgcccgggtggcggcgacgaccgcggggtcgtgtcgacgatgatccgccgcgcgctcgccggcgaacccctgaccatgtggcacgacggcaccatccagcgagagctgctctacgtggacgacgcggcgagcgccttcgtcgccgccctcgaccatgccgatgcgctcgtctgccggcactggccgctcggcagccgccgcggcgaaccggtcggtgaccttttccggacgatcgccgcgctggtcgcggaggagacggggcgtccgccggtgccggtcgtctccgtcgcgccgcccgccagtgcccggcagaccgacttccacagtctggtggtcgacgcatccgccttcaccgccgtgaccggatggcgcgcccaggtggatcttctgcacggtctacgccgtacggtgcggtccctgagcgaaacgcgcctcgatctcggcgcagatctcgtaccgggggagcaccccggccgcgtgggcctgggcgaaggtgatcgcggtccggtcccgatccgacaggatcggctcgatgtcggcgggaacgggcaggccgagcgtgtcgtcgagcggtga

SEQ ID NO: 215 - protein, 359 aa, Micromonospora carbonacea africana
VTGRAGEPADRPVVAVLGASGLVGTAVLAALADRAVTVRAVARRAAVLPAAPGRAAFEVVRADLTDRGALAAAVRDATAVVNLTLDSSGWRGADDDRSARVNVELTRELVGMLRPGPGGTPTTLVFAGSASQVGRPPRIPIDGTEPDHPATPYDRQKQAAESLVVAATGAGVVNGVSLRLPTVFGPVPPGAGPDRGVVSTMIRRALSGAPLTMWHDGRVQRQLLYVADAAAAFVAALDHPGALTGRHWPLGDGRGERLGDLFRAIAALVAERTGRPPVPVLAVPPPDEARVSDFHDMVVDASAFQAVTGWAPRVPLRLALDRTVAALARDDSGPEAPGGVGPTRADQARKPDSISRQVR

SEQ ID NO: 216 - DNA, 1080 bp, Micromonospora carbonacea africana
gtgaccggccgagcgggcgagcccgccgaccggcccgtcgtcgccgtcctcggcgcctccggcctggtcggcaccgctgtgctggccgcgctcgccgaccgggcggtcaccgtccgggccgtcgcccgccgggctgccgtgctgcccgccgcgccgggccgcgcggcgtttgaggtggtacgggccgacctgaccgaccggggagccctggcggcggcggtacgcgacgcgacggccgtggtcaacctcaccctggacagttccggctggcggggcgccgacgacgaccgcagcgcgcgggtcaacgtcgagctgacccgggaactcgtcgggatgctccgccccgggccgggcggcacgcccaccacactggtcttcgccggctccgcctcccaggtgggccggccgccccggatcccgatcgacggcaccgagccggaccaccccgccaccccgtacgaccggcagaagcaggccgcggagtcgctggtcgtggcggccaccggggccggcgtcgtgaacggggtgtcgctgcgactgcccaccgtgttcggcccggtgccgccgggcgccgggcccgaccggggcgtggtgtccacgatgatccgccgggcgctgtccggagcgccactgaccatgtggcacgacggccgggtgcaacggcaactgctgtacgtggccgacgccgccgccgccttcgtggcggcgctggaccaccccggggcgctgaccggccggcactggccgctcggcgacggccggggtgaacggctcggggacctgttccgcgccatcgccgccctggtggccgagcggaccggtcggccaccggtgccggtgctggccgtgcccccgcccgacgaggcccgggtcagcgacttccacgacatggtcgttgacgcctcggccttccaggcggtcaccgggtgggcgccccgggtgccgttgcgcctcgcgctggaccgcaccgtcgcggcgctcgcccgcgacgacagcggccccgaggccccgggcggcgtcggcccgacgcgggcggatcaggcccggaagccggactcgatctccaggcaggtccggtag

SEQ ID NO: 217 - protein, 207 aa, Micromonospora carbonacea aurantiaca
VQVATELAVEGAYVFTPRVFPDPRGVFVSPYLDSVFTETLGYPLFPVAQTSYSVSRRGVVRGLHYTTTPPGSAKFVSCPYGRVLDVVLDVRVGSPTFGRWDSVVLDSQGFRSLYLPTGVAHMFVALMDDTVMSYLLSTEYVFENERALSPLDDTLGLPVPADIEPILSDRDRTAITFAQAHAAGVLPRYEICAEIEARFAQGPHRTA

SEQ ID NO: 218 - DNA, 624 bp, Micromonospora carbonacea aurantiaca
gtgcaggtagcaaccgaactcgccgtcgagggcgcgtacgtcttcaccccgcgggtctttcccgacccgcggggggtcttcgtgtccccgtacctggactcggtcttcaccgagacgctcggatatccgttgtttcccgtggcgcagaccagctacagcgtctcccgccgcggcgtcgtccgcgggctgcactacaccacgacgccgcccggttcggccaagttcgtctcgtgcccgtacggccgggtcctcgacgtggtgctcgacgtccgggtcggatcgccgaccttcgggcgctgggacagcgtggtcctcgactcccagggcttcaggtcgctgtacctgccgacgggggtggcgcacatgttcgtcgccctgatggacgacacggtgatgtcttacctgctctccacggagtacgtcttcgagaacgaacgggcgttgtcaccgctcgacgacacgctcggcctgcccgttcccgccgacatcgagccgatcctgtcggatcgggaccggaccgcgatcaccttcgcccaggcccacgcggccggggtgctcccccggtacgagatctgcgccgagatcgaggcgcgtttcgctcagggaccgcaccgtacggcgtag

SEQ ID NO: 219 - protein, 200 aa, Micromonospora carbonacea africana
VSARPLTVEGAYAFAPTVYPDYRGVFLSPYLDSLFRDTVGYPLFPVRQTSYSVSRRGTLRGLHFTRTPPGTAKFVSCPHGRVLDLVLDVRVGSPTFGKWDSVVLDSEEFQAVYLPVGVAHMFVALADDTVMSYVLSQEYVFENELALDALDPGLGLPIPEDVEPILSERDRTAITFDQALARGLLPDYRTCLEIESGFRA

SEQ ID NO: 220 - DNA, 603 bp, Micromonospora carbonacea africana
gtgtccgcccgcccgctgaccgtcgaaggcgcgtacgccttcgcgcccaccgtctacccggactaccggggggtgttcctctcgccgtatctcgactcgttgttccgggacacggtcgggtacccgctgttccccgtgcggcagaccagctacagcgtctcccgccgggggacgctgcgggggctgcacttcacccgtaccccgcccggcaccgcgaagttcgtctcctgcccgcacggccgggtgctcgacctggtcctcgacgtgcgggtgggctcaccgacgttcggcaagtgggacagcgtggtgctcgacagcgaggagttccaggcggtctacctgccggtcggggtcgcgcacatgttcgtcgccctggccgacgacaccgtcatgtcgtacgtcctgtcccaggagtacgtcttcgagaacgaactggcgctcgacgcgctcgaccccgggctgggcctgcccatccccgaggacgtcgaaccgatcctgtcggagcgggaccgcaccgcgatcaccttcgaccaggcgctcgcccgtgggttgctgcccgactaccggacctgcctggagatcgagtccggcttccgggcctga

SEQ ID NO: 221 - protein, 380 aa, Micromonospora carbonacea aurantiaca
VKILFLPGPVKSNVFGVGALAVAARVSGHEVIVASTVEGAAAATGIGLPAVTTSELTLTQLLTTDRAGNALEFPTDPAELPTFVGHMFGRLAAVNLGPTRDLVTGWRPDVLVSGPHAYAGPLLAAEFGLPCARHLLTGTPIDRDGTHPGVEDELEPELSALGLDRVPDFDLAIDIFPASIRPAGGPVQPMRWTPTSEQRPVEPWMVTPGDRRRVLLTAGSLVTPTHGMDLLWNLVTALADLDVELVVAAPEEVGALVRKMPGVAHAGWVPLDMVLPTCALIVHHSGTMTALTAMQAGVPQLIIPQESRFVDWAGMLATKGIAISLPPGADTEDALAGAARRLLTEPAYATAARALADEIAEMPLPVTVVDVLRDLTEKAR

SEQ ID NO: 222 - DNA, 1143 bp, Micromonospora carbonacea aurantiaca
gtgaagatactctttctgccggggccggtgaaatcgaacgtattcggggtgggggccctggccgtcgccgcacgggtgagcggccacgaggtcatcgtcgcgtccaccgtggagggcgccgccgcggcgacgggcatcggcctgcccgccgtgacgacgagtgagctgacgctgacccagcttctgaccaccgatcgcgccgggaacgcgctggagtttcctaccgaccccgccgagttgccgaccttcgtcggccacatgttcggtcgtctcgccgccgtcaacctcggcccgacgcgtgacctcgtcaccggctggcggccggacgtcctggtgagcgggccgcacgcctacgccggcccgctgctggccgccgagttcggcctgccgtgcgcgcggcacctgctcaccgggaccccgatcgaccgggacggcacgcaccccggcgtcgaggacgagctcgagcccgagctgagcgcgctcggcctcgaccgggtgcccgacttcgacctggcgatcgacatcttcccggccagcatccggcccgcgggcggaccggtgcagccgatgcggtggacgcccaccagcgagcagcggcccgtggaaccgtggatggtcacgccgggggaccggcgccgggtgctgctgaccgccggcagcctggtcacgccgacgcacggcatggacctgttgtggaacctcgtgaccgcgctcgcggacctggacgtcgaactggtcgtcgccgccccggaggaggtcggcgcgctggtccggaagatgcccggggtggcgcacgcgggctgggttccgctggacatggtcctgcccacctgcgccctgatcgtgcatcactccggcacgatgaccgcgctcaccgccatgcaggccggtgtcccgcagctgatcatcccgcaggagagccggttcgtggactgggccgggatgctggcgaccaagggcatcgcgatcagcctgccgcccggtgcggacaccgaggacgccctcgcgggtgcggcccgccggctgctgaccgagccggcctacgccacggccgcgcgtgccctggccgacgagatcgccgagatgcccctgccggtcaccgtcgtcgacgtgctgcgggacctgaccgagaaggcgcggtga

SEQ ID NO: 223 - protein, 389 aa, Micromonospora carbonacea africana
VKILFIAGPTKSSLFGLAPLAIAARMSGHEVVMASTQEVVPATMSVGLPAFPLAALTLAELMTTDRAGDPLRIPAEDAAFVPFVGRMFGRLAAISLDPLRDLVGGWRPDLIVGGPHAYAAPILATELGVPCVRHLLTGNPVDREGTHPGVDEELRPELAALGLAQVPPFHLALDIFPASTRIDDVPPAQPVRPLRWIPTNQQQPVAPWMLSRGPRRRVLVTAGSLVTTTHNFDFLHGLAGTLAEQDVEVVVAAPPEVGRALHDVPGVRHAGWLPLDVVLPHCDLIVHHSGTMTALTALNAGVPQLIVPQESRFIEWARNLSTLGVAQTLAPGEDTPEAVGKVARLLLEDPVHATSAAAIAREIAEMPGPTEVVGQLTEFATRGLTCASS

SEQ ID NO: 224 - DNA, 1170 bp, Micromonospora carbonacea africana
gtgaagatactgttcatcgcaggaccgacgaagtccagcctattcggcctggccccactggcaatcgccgcccggatgagcgggcacgaggtcgtgatggcttccacgcaggaggtcgtaccggcgacgatgtccgtcgggctgccggccttcccgctggcggcgctgaccctcgccgagctcatgaccaccgaccgggccggcgatccgctgcgcatcccggccgaggacgccgccttcgtccccttcgtcggccggatgttcggccggctggcggcgatcagcctggatccgctgcgcgacctggtcggcgggtggcggcccgacctgatcgtcggcggcccgcacgcctacgccgcgccgatcctggccaccgaacttggggtgccctgcgtgcggcacctgctcaccggcaacccggtggaccgcgagggcacccatccgggggtcgacgaggagctgcggccggagctggccgcgctcggcctggcccaggtgccgccgttccacctggccctggacatcttcccggccagcacccggatcgacgacgtcccgccggcgcagccggtgcgaccgctgcgctggattccgaccaaccagcagcagccggtggcgccgtggatgctctcgcgcgggccgcgtcgccgtgtcctggtcaccgccggcagtctggtcaccaccacccacaacttcgacttcctccacggactggccggcaccctggccgagcaggacgtcgaggtcgtggtcgcggcgccgccggaggtgggtcgggccctgcacgacgtgccgggtgtgcggcacgccggctggctcccgctggacgtggtgctgccccactgtgacctgatcgtgcaccactccggcacgatgaccgcgctgaccgccttgaacgcgggggtgccccagctgatcgtgccgcaggagagccggttcatcgagtgggcgcgcaacctgtcgaccctgggcgtggcgcagaccctcgcgccgggcgaggacacgccggaggccgtgggcaaggtcgcccgcctgctgctggaggatccggtccacgccaccagcgccgccgcgatcgcccgggagatcgccgagatgcccggccccacggaggtcgtgggccagctcaccgagttcgcgacccggggcctgacatgcgcgtcctcgtga

SEQ ID NO: 225 - protein, 385 aa, Micromonospora carbonacea aurantiaca
VHRLEGPRWYVRARDDAGPRERMVTVRFLARTLRGLEEVAAREVAGRGCGVEHQRHREVWFRASRPEPSLLDLRTVDDLFLLAGVTEDADHTKAALAAFTRLARDAPLRQLLEVRKTYGYSARAGTLDVAASFLGRRNYNRYDVEEAVGRTAAARLGLRFHSRRNGEAPPEGSLSLRVTVEGTQAALAVRIADRPLHRRSYKTSSTPGTLHPPLAAALAWLAGIRAGMRVVDPCCGTGTILLESGGLSPGAVLLGLDHDPAAVRAAVANAGALDGVRRGSAGGTPGVTWAVGDAGRLPLGAGTVDRVVSNPPWDRQVLARGALADDPARLFREIRRVLAADGLAVLLLHEFEELTGAVAAAGLGVDDVRVVSLFGTHPAMVTLSG

SEQ ID NO: 226 - DNA, 1158 bp, Micromonospora carbonacea aurantiaca
gtgcatcgcctggagggaccgcgctggtacgttcgggcacgcgacgacgcgggcccgagggagagaatggtgacggtgcggttcttggcgcggaccctgcgcggcctggaggaggtcgcggccagggaggtggccgggcgcggctgcggggtcgagcaccagcggcaccgtgaggtgtggttccgcgcgagccgtccggagccgagcctgctcgacctgcgtaccgtggacgacctgttcctcctcgccggggtgaccgaggacgcggaccacacgaaggcggccctggctgccttcacccgcctggcgcgcgacgctccgctgcggcaactgctcgaggtgcggaagacctacggctactccgcccgggccgggacactcgatgtggcggcgtccttcctcggccgccgcaactacaaccggtacgacgtcgaggaggccgtcggccgcaccgcggcggcccggttgggcctgcgcttccactcccgccgcaacggcgaggcgccgcctgagggcagcctctcgctgcgggtcaccgtcgagggcacccaggcggccctggcggtgcggatagccgaccggccgctgcaccggcgctcctacaagacatcctccacgccgggcacgctgcacccgccgttggccgccgcgctggcgtggctggccgggatccgcgccgggatgcgggtggtcgacccgtgctgcggcacgggcacgatcctgctcgagtccggcgggctgagtccgggagccgtcctgctcggcctggatcacgatccggccgcggtccgcgcggctgtggccaacgcgggggcactcgacggggtccgccgtggttcggcaggtgggacgcccggcgtcacctgggcggtaggtgacgccgggcgcctgccactgggcgccgggacggtggaccgcgtggtcagcaatccaccgtgggaccgtcaggtgctggcccgcggtgccctcgcggacgatccggcgcggctcttccgggagatccgccgggtgcttgcagccgacggcctggccgtgttgctgctgcacgagttcgaggaactgaccggggcggtcgccgccgccgggctgggcgtcgacgacgtgcgggtggtcagcctgttcggcacccatccggccatggtgaccctgtccggctga

SEQ ID NO: 227 - protein, 353 aa, Micromonospora carbonacea africana
VTVRFMARTLRGLEEVAAQEIEERGLGRVEHRRHREVWFSAASAEPRLLDLRTVDDLFLLVAVADGVGHTKADLAAFTRLARAAALPAVLPARAACGVPGRPATVDVAASFLGRRNYNRYDIEDAVGRHAVAALGLRYHSRRGGEAPPEGGLSLRVTVEGTQATLAVRVADRPLHRRAYKRSSTPGTLHPPLAAALAWLAGIRPGMLVADPCCGTGTIPVEAAGLAPGAVLFGSDHDPETVGAAVANSAASGARVTWAVADAGRLPLRTGRVDRVVSNPPWDRQVQARGVLAGDSGRLFAELRRVTVDGGRAVLLLHEFADQADLARAAGFGVGDVRPVSLFGAHPSIVDLHG

SEQ ID NO: 228 - DNA, 1062 bp, Micromonospora carbonacea africana
gtgacggtgcgcttcatggcacggaccctgcgagggctggaggaggtggccgcccaggagatcgaggagcggggcctcggccgggtcgagcaccgccggcaccgcgaggtgtggttctccgccgccagcgcggagccgcgcctgctggatctgcgtaccgtcgacgacctgttcctgctcgtcgccgtcgccgacggcgtcggccacaccaaggcggacctggcggccttcacccggctggcccgggcggcggcgctgccggcggtgctgccggcccgcgccgcctgcggcgtgcccgggcggccggcgaccgtggacgtcgccgcctccttcctcggccgccgcaactacaaccggtacgacatcgaggacgccgtggggcggcacgcggtggccgcgctcgggttgcgctaccactcccgccgcggcggcgaggccccgccggagggcgggctgtcgctgcgggtcaccgtcgagggcacccaggcgacgctggcggtacgggtggccgaccggccgctgcaccggcgggcctacaagcggtcgtccacgccggggaccctgcatccgccgctcgccgcggcgctggcctggctggccggcatccgccccgggatgctggtggccgatccgtgctgcggcaccggcacgatccccgtggaggcagccgggctggcaccgggggcggtgctgttcggctcggaccacgacccggagacggtcggcgcggccgtcgccaactcggcggcgtcgggggcccgcgtcacctgggcggtcgccgacgccggacgattgccgctgcggaccggtcgggtggaccgggtggtcagcaatccgccctgggaccggcaggtgcaggcgcggggcgtgctcgccggtgattccggccgcctcttcgcggagctgcgccgggtgacggtcgacggcgggcgggcggtactgctgctgcacgagttcgccgaccaggccgacctggcccgcgccgccgggttcggggtgggcgacgtgcggccggtcagcctgttcggcgcccacccctcgatcgtcgacctgcacggctga

SEQ ID NO: 229 - protein, 416 aa, Micromonospora carbonacea aurantiaca
MISPADRARPRATCRACGGTVVQFLDLGRQPLSDRFLTEPEIPQEYFFQLAVGLCETCTMVQLMQEVPRERMFHEDYPYYSSGSAVMQKHFADTARQLLETEATGPDPFVVEIGCNDGVMLRTVHEAGVRHLGFEPSGKVAEAARAKGLRVRGDFFEESTAREVRASDGPADVIFAANTICHIPYLDSILRGVDALLGPDGVFVFEDPYLGDILAKTSFDQIYDEHFFLFSARSVQALAASFGFELVDVDRLAVHGGEVRYTLARAGARRPADRVAALIAEEDAGGVATLARLDQFAAQVGRIRDDLRALLERLTAEGKRVVAYGATAKSATVANFCGIGPDLVSRVYDTTPAKQGRLTPGTHIPVHAADEFPTDPPDYALLFAWNHADEIMAKEQAFRQAGGAWILYVPHVHVRD

SEQ ID NO: 230 - DNA, 1251 bp, Micromonospora carbonacea aurantiaca
atgatcagcccagccgaccgggcacggccacgagccacctgccgcgcctgcggtggaaccgtcgtgcagttcctcgacctcggccgccagccactgtccgaccgcttcctgaccgaaccggagatcccgcaggagtacttcttccagctcgccgtcggcctctgcgagacgtgcacgatggtgcagctcatgcaggaggtcccccgggagcggatgttccacgaggactacccgtactactcgtccggttccgccgtcatgcagaagcactttgccgacaccgcccggcaactgttggagacggaggccaccggcccggacccgttcgtggtcgagatcggctgcaacgacggggtgatgctgcggaccgtgcacgaggccggcgtccggcacctgggcttcgaaccgtcgggcaaggtcgccgaagcggcaagggccaagggccttcgggtacgcggggacttcttcgaggagtccaccgcccgtgaggtacgcgcgagcgacggccccgcagatgtgatcttcgcggcgaacaccatctgccacatcccgtacctcgactcgatcctgcggggtgtcgacgcgctgctcgggccggacggcgtcttcgtcttcgaggacccctacctgggcgacatcctggcgaagacgtcgttcgaccagatctacgacgagcacttcttcctgttctcggcgcgctccgtgcaggcgttggccgcgtcgttcgggttcgagctggtcgacgtggaccggctggccgtgcacggcggcgaggtccgctacacgctggcccgtgcgggtgcacgccgcccggcggaccgggtggccgcgctgatcgccgaggaggacgcgggcggcgtcgcgacgctggcccggctggaccagttcgctgcccaggtcggccggatccgcgacgacctgcgggcgttgctcgaacggttgacggcggagggcaaacgggtggtggcctacggggcgaccgccaagagcgcgaccgtggcgaacttctgcggcatcgggccggacctggtgtcgcgggtgtacgacacgacgcccgccaaacagggccgcctgaccccgggcacgcacatcccggttcatgcggcggacgagttcccgaccgacccgccggactacgcgctgctcttcgcgtggaaccacgccgacgagatcatggcgaaggagcaggcgttccggcaggccggcggggcctggatcctgtacgttccgcacgttcacgtgcgggattga

SEQ ID NO: 231 - protein, 416 aa, Micromonospora carbonacea africana
MTDSADGTPRRGTCRACGGTTAQFLDLGRQPLSDRFLTEDQLADEFFFHLAVGVCAGCTMVQLMEEVPREEMFHQDYPYHSSGSSVMQKHFADTARHLLEHEATGPDPFVVEIGCNDGVMLRTVHEAGVRHLGFEPSGGVADVARGHGVRVVTEFFEESTARRVRETDGPADVIFAANTICHIPYLDSILRGVDALLAPDGVFVFEDPYLGDILDKTSFDQIYDEHFFFFSARSVQALAARFGFALVDVERLPVHGGEVRYTIARAGARQPAERVAALIGEEDARGVADRSRLDRFAADVEGIRTDLLALLNSLKAEGKRVVAYGATAKSATVTNFCGIGPDLVSWVCDTTPAKQGRLTPGTHIPVRTPDAFTPDAVDYALLFAWNHADEIMAKEQEFRRAGGQWILYVPRVHVTS

SEQ ID NO: 232 - DNA, 1251 bp, Micromonospora carbonacea africana
atgaccgattcagccgacggcacgccccggcgcggcacctgccgggcgtgtggcggcaccaccgcccagttcctcgacctgggtcggcagccgctctccgaccggttcctcaccgaggaccagctcgcggacgagttcttcttccacctggcggtgggggtctgcgcgggctgcacgatggtgcagctcatggaggaggtgccccgggaggagatgttccaccaggactacccgtaccactcgtcgggctcctccgtgatgcagaagcacttcgccgacaccgcgcggcacctgctggagcacgaggccaccggcccggacccgttcgtggtggagatcggctgcaacgacggggtgatgctgcgtaccgtccacgaggcgggagtgcggcacctgggcttcgagccgtcgggtggggtggccgatgtggcccgtgggcacggggtgcgggtggtcaccgagttcttcgaggagtccaccgcccgccgggtcagggagaccgacggccccgccgatgtgatcttcgcggccaacaccatctgccacatcccctacctcgactccatcctccggggcgttgacgcgctgctggcaccggacggggtcttcgtcttcgaggacccgtacctcggggacatcctggacaagacgtccttcgaccagatctacgacgagcatttcttcttcttctcggcgcggtcggtgcaggcgctggcggcccgcttcggcttcgcgctcgtcgacgtggaacgccttccggtgcacggtggggaggtccgctacaccatcgcccgtgccggcgcgcggcagccggccgagcgggtggccgcgctgatcggcgaggaggacgcccgaggggtcgccgaccgcagccggctcgacaggttcgccgccgacgtcgagggcatccgcaccgacctgctcgccctgctgaactcgctcaaggccgagggcaagcgggtggtggcgtacggcgcgacggcgaagagcgccaccgtgacgaacttctgcggcatcggtccggacctggtctcctgggtgtgcgacacgacgccggccaagcagggccggctcacccccggcacgcacatcccggtgcgcaccccggacgcgttcacgcccgacgcggtggactacgcgctgctcttcgcctggaaccacgccgacgagatcatggcgaaggagcaggagttccgccgggctggcggacagtggatcctgtacgtcccccgcgtacacgtgacgagctga

SEQ ID NO: 233 - protein, 400 aa, Micromonospora carbonacea aurantiaca
  misc_feature: C-terminus only
MVDLLTGVLPQIRSEAGDNDRDGTFPVEVFGQLAKLGLMGATVPTALGGLGVHRLYDVAVALMRLAEADASTALALHVQLSRGLTLTYEWMHGSPPVRALAERLLRAMATGEAAVCGALKDAPGVLTELTADGSGGWLLNGRKILVSMAPIGTHFFVHAQRRDADGNVVLAVPVVRRDAPGLTVGTHWDGLGMRASGTLDVSFHDCPVAADHVLDRGPAGARRDAVLAGQTVSSITMLGIYAGVAQAARDLAVETYARRRSRPAAAALALVAGIDTRLYTLRAVAGAALLNADLLAADLTGDLDERGRGMMTPFQYAKMTVNELAPAVVDDCLSLLGGQAYDGQHPLARLYRDVRAGGFMQPYSYVDGVDYLSGQALGADRDNDYMSVRALRSPDPAGER

SEQ ID NO: 234 - DNA, 1203 bp, Micromonospora carbonacea aurantiaca
  misc_feature: C-terminus only
atggtcgacctgctgaccggcgtactcccgcagatccggtcggaggccggtgacaacgaccgggacggcacgttcccggtcgaggtgttcgggcagttggccaagctcggcctgatgggcgcgaccgtgcccaccgcgctcggcgggctcggcgtccaccgcctgtacgacgtcgccgtcgccctgatgcgcctggccgaagcggacgcctccaccgccctggcactgcacgtccagctcagccgcgggctcaccctgacctacgaatggatgcacggctccccgccggtgcgggcgctggccgagcggctgctgcgggcgatggcgacgggggaggccgccgtctgcggggcactgaaggacgcgccgggcgtcctcaccgaactgaccgccgatggttccggcggctggctgctcaacggccgcaagatcctggtcagcatggcgccgatcggtacccacttcttcgtgcacgcccagcgccgggacgccgacggcaacgtggtgctggccgttccggtggtgcggcgcgacgcgcccgggctgaccgtcggcacgcactgggacggcctcgggatgcgggcctccggcaccctcgacgtcagcttccacgactgcccggtcgccgccgaccacgttctcgaccgcgggccggccggcgcgcgccgggacgccgtcctggccgggcagacggtcagctcgatcaccatgctcgggatctacgccggtgtcgcgcaggccgcgcgggacctcgccgtcgagacgtacgcgcgtcgtcgatcgcggccggcggccgccgccctcgccctggtggccggcatcgacacgcggctgtacacgctccgggccgtcgccggcgccgcgctgctcaacgcggacctcctggccgcggacctgaccggcgatctcgacgagcgcgggcgcgggatgatgaccccgttccagtacgcgaagatgaccgtcaacgaactggccccggcggtcgtcgacgactgcctctcgctgctcggcggccaggcgtacgacgggcagcacccgttggcacggctctaccgcgacgtccgggccggtgggttcatgcagccctacagctatgtggatggcgtcgactacctgagcggccaggcgctgggcgcggaccgggacaacgactacatgagcgttcgggcgctccgctccccggatccggcgggagaaaggtga

SEQ ID NO: 235 - protein, 412 aa, Micromonospora carbonacea africana
VAADLRAPLTPAGRTVVDLLAGVIPRISAEAADRDRTGTFPVEAFEQFAKLGLMGATVPAELGGLGLTRLYDVATALMRLAEADASTALAWHVQLSRGLTLTYEWQHGTPPVRAMAERLLRAMAEGEAAVCGALKDAPGVVTELHSDGAGGWLLSGRKVLVSMAPIATHFFVHAQRRDDDGSVFLAVPVVHRDAPGLTVLDNWDGLGMRASGTLEVVFDRCPVRADELLERGPVGARRDAVLAGQTVSSITMLGIYAGIAQAARDIAVGFCAGRGGEPRAGARALVAGLDTRLYALRTTVGAALTNADAASVDLSGDPDERGRRMMTPFQYAKMTVNELAPAVVDDCLSLVGGLAYTAGHPLSRLYRDVRAGGFMQPYSYVDAVDYLSGQALGLDRDNDYMSVRALRSRTSA

SEQ ID NO: 236 - DNA, 1239 bp, Micromonospora carbonacea africana
gtggcggcggatcttcgcgcgccgctcacgccggcggggcgcacggtggtcgacctgcttgccggcgtgatcccgagaatcagtgcggaggccgccgaccgggaccgcaccggcaccttcccggtggaggcgttcgagcagttcgcgaagctcgggttgatgggcgccaccgttcccgccgagctgggcggcctggggttgacccggctgtacgacgtggcgaccgcgctgatgcggctggccgaggccgacgcgtccaccgcgctggcctggcacgtgcagctcagccggggcctcaccctcacctacgagtggcagcacggcacgccgccggtgcgcgcgatggcggagcggctgctgcgggcgatggcggagggcgaggccgccgtctgcggcgcgctcaaggacgcccccggcgtggtcaccgagctgcattccgacggcgccggcggctggctgctgtcgggccgcaaggtgctggtcagcatggcgcccatcgcgacccacttcttcgtgcacgcccagcggcgcgacgacgacggctcggtgttcctcgccgtgccggtcgtgcaccgcgacgcccccgggctcacggtgctggacaactgggacggcctgggaatgcgtgcctcggggacgctggaggtggtcttcgaccggtgcccggtccgggccgacgagctgctggagcgcggcccggtcggggcccggcgggacgccgtgctggccgggcagacggtcagctcgatcaccatgctcggcatctacgccggcatcgcccaggcggcccgggacatcgcggtcggtttctgcgcggggcgcggcggcgagccacgggccggtgcccgggcgctggtcgccgggctggacacccggctctacgcgctacgcaccacggtcggcgcggcgttgaccaacgccgacgcggcgtcggtcgacctgtccggcgacccggacgaacgcggccgacggatgatgaccccgttccagtacgcgaagatgaccgtcaacgagctggccccggcggtggtggacgactgcctcagcctggtcggcggcctcgcctacacggccgggcacccactctcccggctctatcgcgacgtgcgggccggcgggttcatgcagccctacagctacgtggacgccgtcgactacctgagcggtcaggcacttggactcgaccgggacaacgactacatgagcgtgcgcgcgctccgctcccggacctcggcgtag

SEQ ID NO: 237 - protein, 489 aa, Micromonospora carbonacea aurantiaca
MFNRRQLLALGTATATGVAARLVFKGSPTAEAAPVSPHANHLLPAVSEVGATTVTVTPFTEPMPVPPQLSPVSQAGGVDVYEIPIEPAQVQILPGLSTPAYTYGGSFVGPTIRARTNRPVRITYTNGLDSHTNVHLHGGRVPASSDGHPMDIIEPGGSRVYDYPNVQRGATLWYHDHTHDYEADHVYRGLHGFYLIEDPAERHLHLPKGRYDVPILLRNAQFDESGAFVFGNPDDRTTILANGKVQPYFQVAPRRYRFRLLNAALKHVFRLNLGGQTMVRIASDSGLLPAPTTHTELAVSSGERVEIVIDFAEHRGRGPVYLFDGDNPILRFDVGSTRVIDTSRVPDRLRELPPLGTPTVERTVELKFDMSGRPPTAFIDGKVFDPNRVDIQVKRGTTEIWNIVNGDTDPYPFDHPFHLHLVHFQVLGRNGGPPAPEDTGLKDTVYVSPKGSVRFQVTFDAPFVGRYMYHCHYPEHSYLGMMAQLEVVP

SEQ ID NO: 238 - DNA, 1470 bp, Micromonospora carbonacea aurantiaca
atgttcaaccgacgacagctactcgccctcggaaccgccaccgccaccggcgtggcggcccgcctggtgttcaagggttcaccgaccgctgaggcagcgccggtgagcccgcacgcgaatcacctgctgccggcagtcagcgaggtcggcgcgaccacggtgacggtcaccccgttcaccgagccgatgccggtgccaccgcagctgagcccggtctcccaggccggcggcgtcgacgtctacgagatcccgatcgagccggcccaggtccagatcctgccgggactgtccaccccggcctacacctacggcggctcgttcgtcggcccgacgatccgggcgcggaccaaccgccccgtccggatcacctacaccaacgggctggacagccacacgaacgtgcacctgcacggtggccgcgtgccggccagcagtgacgggcacccgatggacatcatcgagccgggcggctcgcgggtctacgactacccgaacgtccaacgcggggccacgctgtggtaccacgaccacacccacgactacgaggccgaccacgtctaccgcggcctgcacggcttctacctcatcgaggaccccgccgagcggcacctgcacctgcccaaggggcgctacgacgtcccgatcctgctgcgcaacgcgcagttcgacgaatccggtgcgttcgtcttcggcaaccccgacgaccgcacgacgatcctggccaacggcaaggttcagccgtacttccaggtggctccccgccgctaccggttccggctgctcaatgcggccctcaagcacgtcttccggctcaacctcggcggccagacgatggtccggatcgcctcggacagcggcctgcttcccgctcccaccacccacaccgagctggcggtctcctccggtgaacgggtcgagatcgtgatcgacttcgccgaacaccgcggacgcggccccgtctacctgttcgacggcgacaacccgatcctgcgcttcgacgtggggtccaccagggtcatcgacaccagtcgcgtgccggaccgcctgcgcgagctgccgccgctgggcacgccgacggtggagcggaccgtggaactgaagttcgacatgtccggccggccgccgacggccttcatcgacggcaaggtgttcgaccccaaccgggtcgacatccaggtcaagcggggcaccacggagatctggaacatcgtcaacggcgacaccgatccgtaccccttcgaccatcccttccacctgcacctggtgcacttccaggtgctcggccgcaacggcgggccgccggctccggaggacaccggtctcaaggacacggtgtacgtgtcgcccaagggctccgtccgcttccaggtcaccttcgacgcgcccttcgtcggccggtacatgtaccactgccactaccccgagcactcgtacctcgggatgatggcccagctggaggtcgtgccctga

SEQ ID NO: 239 - protein, 493 aa, Micromonospora carbonacea africana
VLNRRQLLALGSVAAGGTVMSRSLRRDAQAAQAAPASPANPHAGHAAPVPSRVSTTTVAVTPFTEPMPVPPRLTPVSRRDGIDVYEIPIRPAQVQILPGLLTPAYTYAGSFVGPTIRARTGRPVRITYTNGLDTHANVHLHGGHVPATSDGHPMDLIPPGGSKVYDYPNLQRGATLWYHDHTHAYEADHVYRGLHGFYLIDDPAEHHLRLPAGKYDVPIMLRNAQFDDSGALVFGHPDDRVTILANGKAQPYFEVAPRRYRFRLLNAALKHVFRLNLGGEPLTRIATDGGLLPAPTSHTELALSSGERVEIVIDFAEHAGGGPVYLYDGDNPILRFDVSSRAVTDPSRVPVTLRALPPMGTPTVERTVSMSFDMSARPPIALMDGKPFDPLRVDVQVKRGSTEIWNVVNADTDPFPFDHPFHLHLVTFRVLGRDGGPPAPEDAGLKDTVYVSPKGSVKIQVTFATPYLGQYVYHCHYLEHSSLGMMAQLEVVP

SEQ ID NO: 240 - DNA, 1482 bp, Micromonospora carbonacea africana
gtgctgaacagacgacagttgctcgccctcggcagcgtggccgccggaggcaccgtcatgtcacgctccctcagacgggacgcgcaggccgcccaggcggcaccggcgtcgcccgccaacccgcacgccgggcacgccgccccggtgcccagccgggtcagcacgaccacggtcgcggtcaccccgttcaccgagccgatgcccgtcccgccgcggctgaccccggtctcccgccgcgacggcatcgacgtctacgagatccccatccggccggcgcaggtgcagatcctgcccggcctgctcacgcccgcctacacctacgccggttccttcgtcggccccaccatccgggcccgcacgggccggcccgtgcggatcacctacaccaacgggctcgacacccacgccaacgtgcacctgcacggcgggcacgtgccggccaccagcgacggtcacccgatggacctgatcccgccgggcggctcgaaggtctacgactacccgaaccttcagcgcggcgcgacgctctggtaccacgaccacacccacgcctacgaggccgaccacgtctaccgcggactgcacggcttctatctgatcgacgacccggccgagcatcacctgcgcctgcccgccggcaagtacgacgtgccgatcatgctgcgcaacgcccagttcgacgactccggcgccctcgtcttcggccacccggacgaccgggtcaccatcctggcgaacggcaaggcccagccctacttcgaggtggccccgcgcaggtaccggttccgcctgctcaacgcggcgctgaagcacgtcttccggctcaacctgggcggcgaaccgctcacccgcatcgccacggacggcgggctgctgcccgcccccaccagtcacaccgagctggcgctctcctccggggagcgggtcgagattgtgatcgacttcgccgagcacgcaggcggcgggccggtctacctctacgacggggacaacccgatcctgcgcttcgacgtgtcgtcccgggcggtcaccgaccccagccgggtgccggtcaccctgcgcgcactgcccccgatgggcacgccgaccgtggagcgcaccgtgtcgatgagcttcgacatgtcggcccggcccccgatcgcgctcatggacggcaaaccgttcgaccctctccgggtggacgtacaggtcaagcggggcagcaccgagatctggaacgtggtcaacgcggataccgatccgttccccttcgaccatccgttccacctgcacctggtgacgttccgggtgctcggccgcgacggcgggccgcccgcgccggaggacgccgggctcaaggacaccgtctacgtctcgcccaaggggtctgtcaagatccaggtcaccttcgccacgccgtacctcgggcagtacgtctaccactgccactacctggagcactcgtcgctggggatgatggcccagctggaggttgtgccctga

SEQ ID NO: 241 - protein, 306 aa, Micromonospora carbonacea aurantiaca
MSQTYGRSPLWELYNNTQVTREAVGDLSNFKSSEVNYKLALWDPRVNGVRYLKTLVFTLAAGLSPANWARLRRIANREVGDPFSITYDGEAVCMDYLQAVLEVEFIESRMTLDGTSILEIGAGYGRTCHALLSNHEIAAYHIVDLENSLDLASRYLGAVLTDEQLAKVHFHGVDQAEAGGALRELRFDLAINIDSFAEMTPDTVGAYLDLIATHADHLYVNNPVGKYLDKSLDGHSQGDAVVQLALRTGLLRDIVDIFDDRAVAAQSRRFIDAYRPGRDWALLADARAVPWSFYWQALYRSGAAGR

SEQ ID NO: 242 - DNA, 921 bp, Micromonospora carbonacea aurantiaca
atgagccagacgtacggccgcagcccgctctgggagctctacaacaacacccaggtcaccagggaggccgtcggcgacctgagcaacttcaagtccagcgaggtcaactacaagctggcgctctgggacccgcgggtcaatggtgtgcgctatctgaaaacgctcgtcttcaccctcgcggcgggcctgagcccggccaactgggcccggctgcgccgcatcgccaaccgcgaggtcggcgatccgttctcgatcacctacgacggcgaagcggtctgcatggactacctgcaggcggtgctcgaggtggagttcatcgagagccggatgaccctcgacggtacgagcatcctggagatcggcgccggctacgggcggacctgccacgcgctgctgtccaaccacgagatcgccgcgtaccacatcgtcgatctggagaactcgctcgacctggccagccgctacctcggcgcggtgctgaccgacgagcagcttgccaaggtgcactttcacggcgtcgaccaggcggaggccggcggcgccctgcgggagctccggttcgacctggccatcaacatcgactcgttcgcggagatgaccccggacaccgtcggcgcctacctggacctcatcgccacccatgccgaccacctctacgtcaacaacccggtcggcaagtacctcgacaagagcctggacgggcactcgcagggcgacgcggtcgtccagctcgcgttgcggaccggcctgctgagggacatcgtggacatcttcgacgaccgcgccgtcgcggcgcagtcccgccggttcatcgacgcctaccggccgggccgcgactgggcgctgctcgcagatgcgagagccgtcccgtggagcttctactggcaggcgctgtaccggtccggagctgccgggcgatga

SEQ ID NO: 243 - protein, 309 aa, Micromonospora carbonacea africana
MSDKYGRSALWERYNSTQVTEEAADDLTSFKSSDVNYKLALWDPRVSGVRYLKTLIFNLAENLGEANRARLRRIANRDVGDPISVVWDGDRICMDYLQAVLELEFFSRHVPLDGATVLEIGAGYGRTCHAVLSNHDVAAYHVVDLPNSLALARRYLGTVLTAEQLARVHFHGVGEVDGPLSELRYDLVINIDSFAEMTAETVRAYLAFVATRARHLYVNNPVGKYLDKSLDGHFQGEAVVNLALSTGLLRDVIDIHDNQAVRRQSRAFLDAYRPGPGWACVAESRTIPWSYYWQALYRAGEAAPAPGRD

SEQ ID NO: 244 - DNA, 930 bp, Micromonospora carbonacea africana
atgagcgacaagtacggccgcagtgcgctgtgggaacggtacaacagcacacaggtgaccgaggaggcggcggacgacctcacctccttcaagtcgagcgacgtcaactacaagctcgccctctgggatccccgggtcagcggggtccgctacctgaagacgctcatcttcaacctggccgagaacctgggcgaggcgaaccgggcccggttgcgccggatcgccaaccgggacgtcggcgaccccatctccgtcgtctgggacggcgaccggatctgcatggactatctccaggcggtgctggagctggagttcttctcccgccacgtgccactggacggcgcgacggtgctggagatcggcgcgggctacggccgcacctgtcacgccgtgctctccaaccacgacgtcgccgcgtaccacgtggtcgacctgccgaactccctcgctctggcccgccgctacctgggcacggtgctcaccgccgagcagttggcgagggtccacttccacggcgtcggcgaggtggacgggccgctgagcgagctgcgctacgacctcgtgatcaacatcgactcgttcgcggagatgacggcggagacggtgcgcgcgtacctcgccttcgtcgccaccagggcccgccacctgtacgtcaacaaccccgtcgggaagtacctcgacaagagcctggacgggcacttccagggcgaggccgtggtcaaccttgcgctgagcaccggcctgctgcgcgacgtcatcgacatccacgacaaccaggccgtgcggcggcagtcccgggcgttcctcgacgcgtaccggccggggccgggctgggcctgcgtggcggagagccggacgatcccgtggagctactactggcaggcgctctaccgggccggcgaggcggccccggcacccgggcgggattga

SEQ ID NO: 245 - protein, 323 aa, Streptomyces mobaraensis
MSGSANAALVAEGLRKTYPTGTALDGFDLVVPEGTVCALLGPNGAGKTTAVRILSTLLKPDGGRAVVAGHDVSREPAEVRRNIGVTGQYPAVEEILTGRENLEMWGRLYHVGRKEARRRADELLEQFDLTDAADKRLKHYSGGMRRRLDLAAGFFTVPKVLFLDEPTTGLDPRNRNEVWKMVRSMVDQGTTVLLTTQYLEEADRLADHISVIDSGRGVVEGTPETLKSLVGGDRIVVTLAPGADLAAAAAEVARLTDTEPEVDADTRRVDAAVRDRVGDLVEIVGTLRDRGHEVADVSLRRPTLDDVFLHVTNRAGRRKEPVG

SEQ ID NO: 246 - DNA, 972 bp, Streptomyces mobaraensis
atgagcgggtcggcgaacgccgccctggtcgccgagggcctgcgcaagacctacccgaccgggacggcgctggacgggttcgacctcgtcgtgcccgagggcaccgtctgcgccctgctcggccccaacggcgcgggcaagacgaccgcggtgcgcatcctcagcaccctgctcaagccggacggcggccgggccgtggtggccggccacgacgtgtcccgcgagcccgccgaggtgcgccggaacatcggggtcaccggccagtacccggcggtcgaggagatcctgaccggccgcgagaacctggagatgtggggccgcctgtaccacgtgggccgcaaggaggcccggcgccgcgcggacgagctgctggagcagttcgacctgacggacgccgccgacaagcggctcaagcactactcgggcggtatgcggcgccggctcgacctggccgccgggttcttcaccgtccccaaggtcctcttcctggacgagcccaccaccggcctcgacccgcgcaaccgcaacgaggtctggaagatggtccgttcgatggtcgaccagggcacgaccgtgctcctcaccacgcagtacctggaggaggccgaccggctcgccgaccacatctcggtcatcgactcgggacgcggggtcgtcgagggcacgcccgagaccctgaagtccctcgtcggcggcgaccggatcgtggtgaccctggcccccggcgcggacctcgcggccgccgcggccgaggtcgcccgcctcacggacaccgagcccgaggtggacgccgacacccgccgcgtcgacgcggcggtacgggaccgggtcggggacctcgtggagatcgtggggacgctgcgcgaccgcggccacgaggtggcggacgtgtcgctgcgccgcccgacgctcgacgacgtgttcctgcacgtgaccaaccgtgccggtcgaaggaaggagccggtcggatga

SEQ ID NO: 247 - protein, 337 aa, Streptomyces mobaraensis
VTIGLEKGQRAVVTGGAGFIGSHLCERLVERGLSVIAVDNLSTGRASNVEALADEERFTLLRADVTEPFSVEGPVHHVVHLASPASPLDYLALPLETLRVGSAGTENALRLAVEHGARFVVASTSEVYGDPLEHPQPESYWGNVNPIGPRSVYDEAKRFTEALTAAYARTLGADTGIARLFNSYGPRMRREDGRVVPTFIDQALAGLPLTINGTGEQTRSLCYVEDTVRGLMALMESSFPGPVNLGATGEMTVREIAEAIAAHAGVELRTEYRPPTEDEPGRRRPDIETARTKLGWQPEVPLAEGIKRTLDWWQTAYPRDTARDGAHGTSDIRSEAA

SEQ ID NO: 248 - DNA, 1014 bp, Streptomyces mobaraensis
gtgacgatcggactcgagaagggccagcgggccgtcgtcaccgggggcgccggcttcatcggctcccacctgtgcgaacggctcgtcgagcggggcctgtcggtgatcgccgtggacaacctgtcgaccggcagggcctccaacgtcgaggcgctggccgacgaggagcggttcacgctgctgcgggccgacgtgaccgagccgttctccgtcgagggaccggtccaccacgtcgtccacctggcgtcgccggcgtcccccctggactacctggcgctgccgctggagacgctgcgcgtcggctcggccgggaccgagaacgcgctgcggctggcggtcgagcacggcgcccgcttcgtggtcgcctccacctcggaggtctacggcgaccccctggagcacccgcagcccgagagctactggggcaacgtcaacccgatcggcccgcggtcggtgtacgacgaggccaagcggttcaccgaggcgctgaccgccgcctacgcccgcacgctgggcgcggacaccggcatcgcccggctgttcaactcgtacggcccgcggatgcggcgcgaggacgggcgggtggtgccgaccttcatcgaccaggcactcgccggcctgcccctcaccatcaacgggaccggcgagcagacccgttcgctgtgctacgtcgaggacaccgtgcgggggctgatggcgctgatggagtcgtccttcccggggccggtcaacctcggcgcgaccggcgagatgaccgtccgcgagatcgcggaggcgatcgccgcgcacgcgggcgtggagctgcgcaccgagtaccggccgcccacggaggacgagcccggccggcgccgccccgacatcgagaccgccaggacgaagctgggctggcagcccgaagtgccgctcgccgagggcatcaagcgcaccctcgactggtggcagaccgcctacccgcgggacacggcccgcgacggcgcccatggtacgagcgacatcaggagtgaggcggcatga

SEQ ID NO: 249 - protein, 264 aa, Streptomyces mobaraensis
MAALGRARWAVTDGWVVGRANMINWRRNPGLIFYCMMFPIMTVVFGYVFGSAMSVEGGGDYRAFLMPGLFGQAMMFGVVTSMLAVTSAVSRGVTDRFRSMPMAQSGVALGRSFADMFSSLIELTILLVCGLLVGWRWHEGPGKALAALGLLLLWRYSLIWVGIYLGLLLPPDAAGAAYVPLLPLTMLANTFVSPEKMPGWLGHIAEWNPLSSTVSACRELFGNPGVGGDSWVTDHAVALAVAWPVLLLVIFMPLSVRRYRTLSR

SEQ ID NO: 250 - DNA, 795 bp, Streptomyces mobaraensis
atggccgcgctgggaagggcccggtgggccgtcaccgatggctgggtggtcggccgcgccaacatgatcaactggcgccgcaaccccggactcatcttctactgcatgatgttcccgatcatgacggtggtcttcggctacgtcttcggcagcgccatgtcggtcgagggcggcggggactaccgcgccttcctgatgccgggcctgttcgggcaggcgatgatgttcggcgtcgtgaccagcatgctggccgtcaccagcgcggtctcccggggggtgaccgaccggttccgctcgatgccgatggcccagtcgggcgtcgccctgggccgcagcttcgccgacatgttcagctcgctgatcgagctgacgatcctcctcgtctgcggactgctggtcggctggcgctggcacgagggccccggcaaggcgctggccgcgctcggcctgctgctgctctggcgctactcgctcatctgggtcgggatctacctgggcctgctgctgcccccggacgccgcgggcgcggcgtacgtgccgctcctgcccctgacgatgctggcgaacaccttcgtatcgcccgagaagatgcccggctggctgggccacatcgcggagtggaacccgctgtcgtccacggtgtccgcctgccgtgagctgttcggcaacccgggcgtcggaggcgactcctgggtcaccgaccacgccgtggccctggccgtcgcctggcccgtactgctgctcgtgatcttcatgccgctgtcggtgcgccgctaccggacgctcagccgatga

SEQ ID NO: 251 - protein, 99 aa, Streptomyces mobaraensis
VHLLSERELQVFSLLSHGYSNREIAAFLGVTERTVKAHMAQILAKLRVESRLQAGLVAFAHGLTGSPTPPPPHRGAVSGGAVSGVLPGSTSLHGKGVGR

SEQ ID NO: 252 - DNA, 300 bp, Streptomyces mobaraensis
gtgcatctgctctccgagcgcgagctccaggtcttctccctgctgagccatggctactccaaccgcgagatcgcggcgttcctcggggtcaccgagcgcaccgtcaaggcgcatatggcgcagatcctcgcgaaactcagggtcgagtcccgcctgcaggccggactggtcgccttcgcccacgggctcacgggctcgccgacgcctccgccgccccaccgtggcgctgtctccggcggtgccgtctccggtgtcctgccggggtcaacctccctgcacggtaagggagtcggccgctag

SEQ ID NO: 253 - protein, 356 aa, Streptomyces mobaraensis
MLEAGRLIRADDPVLTYRGAVSLQEVDGGILPWRIPFQERHLFFPEGSVGRAAMPSGVRITFRTDAAGFAFRYAARPAHEMPGPPENPQVDVRVDGKPVASLPLVTDQGIHTCHVGSLPGAGAGRLVELWLPCLNQFTLHGVEVPADAEVSADTTSAPRWVHYGSSESQGRGALSPSRNWTATVATELGLDLTSLAIGAGCYLQPLFATLLRDLPADLITCMVGINIYGTRALNQFTYRPNLIGMIRIIRERHPSTPLLIASHHHSPWHDPLKGDGYLSLVEVREQTREVVELLRADGDENLHYVHGPSLAGPETAHLYVEPRHLDPLHFNQEGHDLLAAAFRRKVEELVPGLARV

SEQ ID NO: 254 - DNA, 1071 bp, Streptomyces mobaraensis
atgttggaagcggggcgcctcattcgggcggacgacccggtactgacctatcgcggtgcggtctccctccaggaggtcgacggcggaatactgccctggcgaataccttttcaggaacggcatctgttctttcccgagggcagcgtggggcgcgccgcgatgccgtcgggggtacggatcactttccgcacggacgcggcggggttcgccttccggtacgccgcccggcccgcccacgagatgccgggtccgcccgagaacccgcaggtggacgtgcgcgtggacggcaagccggtcgccagtctcccgctggtgaccgaccaggggatccacacctgccacgtcggatccctgccgggcgccggcgccggccgtctcgtggagctgtggctgccctgtctgaaccagttcaccctgcacggggtggaggtgccggcggacgccgaggtgagcgcggacaccaccagcgcgccccgctgggtccactacggctcctccgagtcccagggccggggggccctgtcgcccagccggaactggaccgcgaccgtcgccacggaactcggcctggatctcacgtcactggcgatcggggcgggctgctacctccagccgctcttcgcgacactgctccgtgatctgcccgccgatctgatcacgtgcatggtcggcatcaacatctacgggacccgggccctcaaccagttcacctaccggcccaacctgatcggcatgatccggatcatccgggagcggcacccctcgacgcccctgctcatcgcgtcgcaccaccactccccgtggcacgacccgctgaagggggacgggtacctgtcgctggtggaggtccgggagcagacccgcgaggtggtcgagctgctgcgcgcggacggcgacgagaacctccactacgtccacggtccgagcctcgccggccccgagaccgcccacctgtacgtggagccgaggcacctcgacccgctgcacttcaaccaggaggggcacgatctgctcgcggccgccttccggcgcaaggtcgaggagctggtgcccgggctggcgcgggtctag

SEQ ID NO: 255 - protein, 249 aa, Streptomyces mobaraensis
VRPAAGPGRAAAAHPGAQVRVAVVGAGGFVGTAITRALGSAAVPVTRATYEEARRSGPFDVLVNTACPSRRYWARQHPDEDRRETVDKTRALLRDWEWGRFVQISTISARTQPDTPYGRNRAEAEELCADHLIVRLGPMYGDANTKGVLMDFLGDQPVYAHGDSRQSFAPVDWCGRWIASHLDAEGLWEVGARTTVSLREIRDAVGSRSVFAGTRKDDQFPLVSRPDWPDAADVIGWLGARSRALTGES

SEQ ID NO: 256 - DNA, 750 bp, Streptomyces mobaraensis
gtgcgacccgccgctggtccaggtcgagccgctgccgcacaccctggagcgcaggtgagggtcgcggtggtcggcgccggcggcttcgtcggcaccgccatcacccgggcgctgggatccgcggcggtccccgtgacccgtgcgacctacgaggaggcccgccgcagcggccccttcgacgtcctcgtcaacacggcctgcccgtcccggcgctactgggcccggcagcaccccgacgaggaccgccgcgagaccgtcgacaagacccgggcgctcctccgcgactgggagtggggccgcttcgtgcagatcagcaccatctccgcgcgcacccaaccggacaccccctacggcaggaaccgggccgaggccgaggaactctgcgcggaccacctgatcgtccgcctgggtccgatgtacggcgacgccaacaccaagggcgtcctcatggacttcctcggggaccagccggtctacgcgcacggcgattcgcggcagagcttcgcgccggtcgactggtgcggccgctggatcgcgtcccacctcgacgccgagggcctgtgggaagtgggcgcgcggacgacggtcagcctgcgggagatcagggacgcggtcggctcgcgctcggtcttcgccggcacacggaaggacgaccagttccccctggtcagccggcccgactggccggacgccgcggatgtcatcggctggctcggggcccgtagcagagcactgactggagaatcatga

SEQ ID NO: 257 - protein, 309 aa, Micromonospora carbonacea aurantiaca
VPTAIVVGAEGQDGVLLSRLLRAHDYRVVPVGRHGPVDIVRPDDVAELVTELRPDEIYLLAAVQNSAQDPVADPVELAHRSYAVNTLAVVHFLEAVERHSPATRVFYAASSHVFGRPDTPVQDETTPLRPTSVYGISKAAGLLHCRSYRARGVFASVGILYSHESPLRRPGFVSRKIVDAVVRIQRGEAFRLVLGGLAAEVDWGYAPDYVDAMRRILGLATADDYVVASGVRRTVREFAETAFAAVGLDWRDHVEENAAVLTRPSVPLVGDASRLQAATGWRPSVDFAGMVRALLRAAGADLVGTGQDG

SEQ ID NO: 258 - DNA, 930 bp, Micromonospora carbonacea aurantiaca
gtgccgacggcgatcgtggtgggtgccgagggccaggacggggtgttgttgagccggctgttgcgggcccacgactaccgggtggtgccggtgggccggcacggcccggtcgacatcgtccggcccgacgacgtggccgaactggtgaccgagctgcgaccggacgagatctacctgctggcagcggtgcagaactccgcgcaggacccggtcgccgatccggtggagctggcgcaccggtcgtacgccgtcaacacgttggccgtggtgcacttcctggaggccgtcgagcggcacagcccggcgaccagggtgttctacgccgcctcctcacacgtcttcggcaggccggacacgccggtacaggacgagaccacgccgcttcgaccgacctccgtctacggcatcagcaaggcggccggtctgctgcactgtcgttcctaccgggcgcggggggtgttcgcctcggtcggcatcctctacagccacgagtccccgctccgccgccccggcttcgtgtcccgcaagatcgtggacgccgtggtccgcatccagcgcggcgaagcgttccggctcgtgctcggcggcctggcggccgaggtggactggggctacgcgccggactacgtggatgcgatgaggcggattctcggcctggcgacagcggacgactacgtggtcgcctcgggggtgcggcgcaccgtccgcgagttcgcggagaccgccttcgcggcggtcgggctggactggcgcgaccacgtcgaggagaacgccgcggtgctcacccggccgagcgtgccgctggtcggcgacgcgagccggttgcaggccgcgaccggctggcgcccgagcgtcgacttcgccggcatggtgcgggccctgctgcgggcggcgggtgccgacctggtcgggacgggccaggacggatag

SEQ ID NO: 259 - protein, 517 aa, Micromonospora carbonacea aurantiaca
MRHRHALLAVGTTATLVAAGLAGLTFPASAAATGCSVAYTVQSQWTGGFSGNVAITNLGSALTGWTLTFDFPTSGQQVTQGWSATWSQSGTSVSAASLSWNGSLGTGGSTTIGFNGSWSGSNPVPKSFALNGTTCTGSVTSPTPEPTTTPPPTTPPPTTPPPTTPPPTTPPPTTPPPTGAAPALKVSGNRLVTASGATYRLLGVNRASGEFACVQGKGMWDSGPVDQASVNAMKAWNIRAVRIPLNEDCWLGLSGSPSGATYQQAVKDYVNLLVANGINPILDLHWTHGQYTGNISACADVNATCQKPMPSMQHTPQFWTGVANAFKGNDAVVFDLFNEPYPDAANNWSDMAAAWRCLRDGGTCTGITYEVAGMQDLVDAVRATGASNVLLVAGLTWTNDLSQWLTYKPNDPLGNIVASWHSYNFNACVTASCWDSQIGAVAAQVPVHAGEIGQDTCAHDYIDQVMTWLDSKRIGYTAWTWNPWGCSGGNVLIQDYNGTPTSTYGEGYKAHLLSVTP

SEQ ID NO: 260 - DNA, 1554 bp, Micromonospora carbonacea aurantiaca
atgagacatcgtcatgccctgctggccgtcggcaccaccgcgaccctggtcgccgccggcctggccgggctcaccttccccgcctcggccgcggccaccggctgctccgtggcatacaccgtgcagagccagtggacaggcgggttcagcgggaacgtcgccatcaccaacctcggctccgccctcaccggctggacgctgaccttcgacttcccgaccagcggccagcaggtcacccagggctggagcgccacctggtcgcagtccggcacgagcgtctcggccgccagcctgagctggaacggatcgctgggcacgggcggatcgaccacgatcggcttcaacggctcgtggagcggcagcaaccccgtgccgaagtcgttcgcgctcaacggcacgacctgcaccggctcggtgacctcgccgaccccggagccgaccaccaccccgccgccgacgaccccgccgcccaccactcccccgcccacgaccccaccgcccaccactcccccacccacgaccccgccgccgaccggggccgcgcccgcgctgaaggtctccggcaaccggctggtgacggcgagcggggcgacctaccggctgctcggagtcaaccgggccagcggtgagttcgcctgcgtgcagggcaagggcatgtgggacagcggccccgtcgaccaggcctcggtcaacgccatgaaggcgtggaacatccgcgccgtgcggatcccgctcaacgaggactgctggctcggcctctccggctcgcccagcggcgcgacgtaccagcaggccgtcaaggactacgtgaacctgctcgtggccaacgggatcaacccgatcctcgacctgcactggacccacgggcagtacaccggcaacatctccgcctgcgccgacgtcaacgccacctgccagaagccgatgcccagcatgcagcacactccgcagttctggaccggcgtcgccaacgccttcaagggcaacgacgccgtggtgttcgacctgttcaacgagccctacccggacgccgccaacaactggtcggacatggctgccgcgtggcgctgcctgcgcgacggcggcacctgcaccggcatcacctacgaggtcgccggcatgcaggacctggtcgacgccgtccgggccaccggtgccagcaacgtcctgctggtcgccggcctgacctggaccaacgacctgagccagtggctcacctacaagccgaacgacccgctcggcaacatcgtggcgtcgtggcactcgtacaacttcaacgcctgcgtcaccgcctcctgctgggacagccagatcggcgccgtcgccgcgcaggtgccggtgcacgccggcgagatcggccaggacacctgcgcccacgactacatcgaccaggtgatgacctggctggactccaagcggatcggctacacggcgtggacctggaacccgtggggatgcagcggcggcaacgtcctcatccaggactacaacggcaccccgaccagcacctacggtgagggctacaaggcccacctgctctccgtgaccccgtaa

SEQ ID NO: 261 - protein, 423 aa, Micromonospora carbonacea aurantiaca
VSGPRADKLPHASSKAAVLDAIRAAGTISRVGLISVTGFTAPTISNLVRKLIDEGLVVETGHAESTGGKRRVLLRLNHTSRYAVGVCLGQGVMTYVLTDLTGIVVARISRPGVGVEAPATVVSRIAAEIPTLVDSVGVDRARLVGVGLVFPGPLTGRGVAGLNPELRHWREFPLGAALEQATELPVVLDNDATAAALGEHWAGGFGTASAAAALYMGSGLGAGLVIDGITYRGPSGNAGELGHVCVAADGPPCWCGARGCVEAVAGPAAVVAAGRADAGLARALGLTTGAGPAAVARDFAAIGRAARRGEQRALALCERSARYVAAAARTLANVMDLEVIVLTGPGFAVAGSVYLPVLRQELHTVFSRSAHPVDVRLSRSAATASAVGAAALVLESELVPFHRGLRVSESLDGEFAPLPGSAR

SEQ ID NO: 262 - DNA, 1272 bp, Micromonospora carbonacea aurantiaca
gtgagcggaccgagggcggacaagctgccgcacgcgagcagcaaggccgcggtgctggacgccatccgggcagccggcacgatcagccgggtgggcctgatcagcgtgaccggcttcactgcgcccaccatttccaacctcgtccgcaagctcatcgacgagggcctggtcgtcgagaccggccacgccgagtcgaccggcggaaaacggcgggtcctgctccggctcaaccacacctcccggtacgcggtgggcgtgtgcctcggccagggcgtcatgacgtacgtcctgaccgatctgaccgggatcgtggtggcccggatctcccggcccggcgtcggcgtcgaggcgcccgcgacggtcgtctcccggatcgcggccgagataccgaccctggtcgacagcgtcggcgtggaccgggcccggttggtcggggtggggctggtcttccccggcccgctcaccggccggggggtcgccggcctgaaccccgagctgcggcactggcgggagttcccgctcggcgcggcgctggagcaggcgaccgagctgccggtggtgctggacaacgacgccacagccgccgccctgggcgaacactgggcgggcgggttcggcacggcgagcgccgccgccgccctctacatgggcagcggcctcggcgccgggctggtcatcgacgggatcacctatcgcggaccgagtggcaacgccggcgagctggggcacgtctgcgtggccgcggacggcccgccctgctggtgcggcgcgcgggggtgcgtggaggccgtcgccgggcccgccgccgtggtcgcggcggggcgggcggacgccggcctggcccgggcgctcggcctcacgaccggcgccggccccgcggcggtggcccgcgacttcgccgcgatcggccgcgccgcccggcgcggggagcagcgggccctggcgctgtgcgagaggtccgcgcggtacgtcgcggcggccgcccgcaccctggccaacgtgatggacctggaggtcatcgtgctgaccgggccgggcttcgccgtcgccggctcggtctacctgcccgtgctccgccaggagctgcacacggtgttctcccgctccgcgcaccccgtcgacgtacggctgtcccggtccgccgccaccgcgtccgccgtcggggccgccgccctggtcctggagtccgagctggtcccgttccaccgcgggctccgggtgtcggagagcctcgacggggagttcgcgccgctgcccggatcggcccgctga

SEQ ID NO: 263 - protein, 250 aa, Micromonospora carbonacea aurantiaca
MEHPRSLYLDLLEKVVTNLIYEDPPVPNQWLHEREFKATNRENGKDWPSMAHTMVGLKRIRNIRALLEQVIADGVPGDFIETGVWRGGVCIMARGVFEAYGIRDRTVWVADSFEGIPDTGADGHPMDQALGLHHCNDVLGIPVEVVQANFARYGLLDDQVRFLPGWFSDTLPHAPISQLAVLRLDGDLYESTRDALVNLYAKVSPGGYVVIDDYVIPACRKAVQEFRAAQGVTEPLQVIDEYSVYWRRAA

SEQ ID NO: 264 - DNA, 753 bp, Micromonospora carbonacea aurantiaca
atggagcatccccgaagtctctatcttgatctcctcgaaaaggtcgtcacgaacctgatctacgaggacccgccggtgcccaaccagtggctgcacgagcgggagttcaaggcgaccaaccgggagaacggcaaggactggccgagcatggcgcacaccatggtcgggttgaagcgcatcaggaacatccgcgccctgttggagcaggtcatcgcggacggcgtccccggtgacttcatcgagacgggcgtgtggcgcggcggcgtgtgcatcatggcccgtggggtgttcgaggcctacgggatccgggaccggacggtgtgggtggcggattcgttcgaagggatcccggacaccggggccgacggtcacccgatggaccaggccctggggctgcaccactgcaatgacgtgctgggcatcccggtggaggtcgtacaagccaacttcgcccgctacgggctcctggacgaccaggtgcggttcctgccggggtggttctcggacacgctgccacacgcgcccatcagccaactcgccgtgctgcgactcgacggcgacctctacgagtcgaccagggacgccctggtcaacctgtatgcgaaagtcagcccgggcggatacgtcgtgatcgacgactacgtcattccggcctgccgcaaggcggtccaggagttccgcgcggcccagggagtcaccgaaccacttcaggtgatcgacgagtacagcgtctactggcggcgggcggcctga

SEQ ID NO: 265 - protein, 394 aa, Micromonospora carbonacea aurantiaca
VTGSLVQRLLAAADAPDPGVHLAAEDPEAVVAVAMAEVAGRTVLYPGPATPLTVQIDVDVADARQISYLLAAGPHGGQARPGRTDDPWVRVRYDLAALVRDVFGPAGPWTGTGRDVVMKDEPGPVEYKPDDPWLVRREEATRAAYQALRACEPYRGDLAALALRFGSDKWGGHWYTSHYERHLGGFRDHRLNLLEIGIGGYHEPDAGGASLRMWKHYFHRGSVYGLDVYDKSLLDEPRLTTLRGDQADPAMLADLARRHGPFDIVIDDGSHVSSHVITAFQALFPHVRPGGVYVIEDLHTSYWPEWGGNGTDLSDPATSVGFLKTLVDGLHHRDRLHDGPYQPTYPDLTVTGLHLYHNLAFVEKGRNTEQANATWRPRNDPMRDLPKPQRSAGE

SEQ ID NO: 266 - DNA, 1185 bp, Micromonospora carbonacea aurantiaca
gtgaccggctcgctcgtccagcggctgctcgccgcggcggacgctcccgacccgggcgtgcacctcgcggccgaggatccggaagcagtggtggccgtggccatggcggaggtggcgggccggaccgtcctctacccgggcccggcgacgccgctgaccgtacagatcgacgtggacgtcgctgacgcgcgacagatctcctacctcctggcggccggtccgcacgggggccaggcgcggccgggccggaccgacgacccgtgggtgcgagtccggtacgacctggcggcgctggtgcgggacgtgttcgggccggccggcccgtggaccggtaccggccgggacgtggtgatgaaggacgagcccggcccggtggagtacaagcccgacgacccgtggctggtacggcgggaagaggcgacccgcgcggcctaccaggctctccgcgcgtgcgagccgtaccgtggcgacctggccgcgctggcgctgcggttcggctcggacaagtggggcgggcactggtacacctcccactacgagcggcacctcggcgggttccgggaccaccggctgaacctgctggagatcggcatcggcggctaccacgagccggacgccggcggggcctcgttgcgcatgtggaagcactacttccaccgcggcagcgtgtacgggctcgacgtgtacgacaagtcgctgctggacgagccacggctcaccacgctccgtggtgaccaggccgacccggcgatgctcgccgacctcgcgcggcggcacggccccttcgacatcgtgatcgacgacggcagccacgtcagcagccacgtcatcaccgcgttccaggcgctcttcccccacgtgcgccccggcggcgtgtacgtgatcgaggacctgcacacctcgtactggccggagtggggtggaaacggcaccgacctgtccgaccccgccacgtcggtcggcttcctcaagacactcgtcgacggtctgcaccaccgcgatcgcctccacgacggtccgtaccagccgacgtacccggacctgaccgtgacggggctgcatctctaccacaatctcgcgttcgtcgagaagggccgtaacaccgaacaggccaacgccacgtggcggccgcggaacgacccgatgcgcgatctgccgaaaccgcagcggtcagcgggggagtga

SEQ ID NO: 267 - protein, 286 aa, Micromonospora carbonacea aurantiaca
MSTTSAVGLVLARAPRLLGAEPFFMEFISGIEERLAEHGRSVLLHIVADHAAEIAAYRRWAQLRLAEAVVLVNPTAADPRPAVLRDLGLPVVVAGEPAGDTPAVRRDDVGSVRAAVAHLAGLGHRRIARISGPDSLRHTRTRTAALLAAAAPAGIDAVVLTGDYSEESGAAATVRLLRDGDPPSAIIYDNDLMAVGGLEVARELGLAVPRDLSMLAWDDSSLCRLSSPQLTTMSLDVHEFGALVAASVLALLDGEPVRERWCPTETVIARHTTGPAPAGKQGRTSA

SEQ ID NO: 268 - DNA, 861 bp, Micromonospora carbonacea aurantiaca
atgagcacgacgagcgcggtcggcctggtgctcgcccgggcgccccgcctgctcggcgccgagccgttcttcatggagttcatctccggcatcgaggaacgtctcgccgagcacggccggtcggtgctgctgcacatcgtcgccgaccacgccgccgagatcgccgcctaccgccggtgggcacagctccggctggccgaggccgtggtgctggtgaacccgaccgccgcggacccccggccggcggtcctgcgcgacctgggcctccccgtggtcgtggccggcgagccagccggcgacaccccggccgtgcggcgcgacgacgtcggctcggtacgggcggcggtcgcgcacctggccggcctcgggcaccgccggatcgcgcggatcagcgggcccgacagcctgcggcacacccgcacccgcacggccgcgttgctggccgccgccgccccggccggcatcgacgccgtggtcctgaccggcgactactcggaggagtcgggcgcggcggcgaccgtccggctgttgcgcgacggcgacccgcccagcgcgatcatctacgacaacgacctgatggcggtcggcggcctggaggtggccagggagctgggcctggcggtcccccgcgacctgagcatgctcgcctgggacgactccagcctgtgccgcctgtcctccccgcagctcaccacgatgagcctcgacgtgcacgagttcggcgcgctggtggccgcctccgtgctcgccctgctcgacggcgagccggtccgggaacggtggtgccccaccgagacggtgatcgcccggcacaccaccggccccgcgccggccgggaagcagggccggacgtcagcttga

SEQ ID NO: 269 - protein, 342 aa, Micromonospora carbonacea africana
VRQRCIGERGPLVSALGLGTWALGGQWGRRIEPGVQAVRRAFDLGVTLFDTSRAYGGGAAEAALARGLADLLPAHRDEIVIATAGGLETRPGVRRHKLDPPGRTVRNSDPAFLRDELLASLRQLGTDHVDVYSVHWPDPTVPLAETAEVLAGFVREGLARHVGFANVTAGDLAELVPTGLLDVVQVPFNLLDRGAEKEVLPRCQEAGVGVLGGSALAHGLLTGALHRDQAFAPEDWRAYSHAFRGEDYAQLLDVVDGLAAFAAERGHTVAQVALAWALHHPAGVVPVFGAQSPGVVEENVRAAGLELSEIELRELELLVRTAPAVGSGAGPACRTEERDDVH

SEQ ID NO: 270 - DNA, 1029 bp, Micromonospora carbonacea africana
gtgcggcagcgctgcatcggtgagcgggggccgctggtctcggcgctcggcctgggcacctgggcgctcggcggccagtggggccggcggatcgaaccaggcgtgcaggccgtccgccgggccttcgacctgggcgtcacccttttcgacacctcccgggcgtacggcggcggggccgccgaggcggcccttgcccgcgggctggccgacctgttgcccgcgcaccgggacgagatcgtgatcgccacggccggcgggctggagacccggcccggcgtgcgacggcacaagctcgacccgcccggacggacggtgcgtaacagcgaccccgcgttcctccgggacgagctgctggccagcctgcgtcagctcggcacggaccacgtcgacgtgtactccgtgcactggcccgacccgaccgtcccgctcgcggagaccgccgaggtgctggcggggttcgtgcgcgagggcctggcccgccatgtcggcttcgccaacgtgacggcgggcgacctggccgagctggtgccgaccgggctgctggacgtcgtccaggtgccgttcaacctgctcgaccgtggtgccgagaaggaggtgctgccccgctgccaggaggccggcgtcggggtgctgggcggctccgcgctcgcccacgggctgctcaccggcgcgctgcaccgcgaccaggcattcgcccccgaggactggcgggcctactcgcacgccttccggggtgaggactacgcccaactgctcgacgtggtcgacggcctcgccgccttcgccgccgagcgtgggcacaccgtcgcgcaggtggcactggcctgggcgctgcaccacccggccggggtggtgccggtgttcggcgctcagtcgcccggagtcgtcgaggagaacgtccgcgccgccggcctggagctgtccgagatcgagctgcgggagctggaactcctggtccgtaccgccccggcggtcggctccggggccggaccggcgtgccggaccgaggagcgtgacgatgtccactga

SEQ ID NO: 271 - protein, 248 aa, Micromonospora carbonacea africana
MTTPLPRPIDAVLFDFSGTLFAVELPQRWLRAAAATVGVQLDPAQQEALTGLLLAAGRPGGPEPHAVPPGLAEVYARRDLSPETHRSAYVGLLSTVDLPHPGLAEALYDRLFRTDGWLPYRDAAPVLAELRRRGVGTAVVSNIAWDLRPTFAAYGMAELVDAYVFSHEVGAVKPDPRIFRTACDELKVAPERALMVGDTLADGGAVYAGLQTLLLPASPPDTVHGLAAVLELVGGGPARPPFAEMADA

SEQ ID NO: 272 - DNA, 747 bp, Micromonospora carbonacea africana
atgacgacccccctgccccgtccgatcgacgccgtcctgttcgacttctccggcacgctgttcgccgtggaactgccgcagcgttggctgcgggcggcggcggccaccgtcggcgtccagctcgacccggcgcagcaggaggccctgaccgggttgctgctggcggccggccgtcccggcgggccggagccgcacgccgtcccgccggggctcgccgaggtgtacgcccgccgggacctctcgcccgaaacgcaccgcagcgcgtacgtgggcctgctctccaccgtcgacctgccccatcccggcctcgccgaggcgctctacgaccggctgttccgcacggacggctggctgccctaccgcgacgccgccccggtcctggcggagttgcgccggcgcggcgtgggcaccgccgtggtcagcaacatcgcctgggacctgcggcccaccttcgcggcgtacgggatggcggagctggtggacgcctacgtcttctcccacgaggtgggggcggtcaagcccgatccccggatcttccgcaccgcctgcgacgagctgaaggtcgccccggagcgggcgctgatggtgggcgacaccctggccgacggtggggcggtgtacgccggcctgcagaccctgctgctgccggccagcccgccggacaccgtgcacggcctggccgccgtgctcgaactggtcggcggcgggccggccaggcccccgtttgcggaaatggcggacgcatag

SEQ ID NO: 273 - protein, 354 aa, Micromonospora carbonacea africana
VEYRQLGRCGLRVSKVSLGAFNFGGPTGPEEAARIVATAVEAGVNLVDTANVYQDGRSEEIVGAAVRSCRDDVLLATKIFNPVGPGPNDRGTSAYALKRECERSLRRLGTDHIDLLYLHRHDPDTPVEETVSALDDLVRSGKVRYVGTSTVPTAYELADQPRLGTVPSWRIVDLLRTAQSRGAAPVVAEQSPYNLLEREIERDVLPLCAEYGLGLFTYSPLAMGLLSDRFADGEPPRDARFTAWYAPSGPHWQPVWRTLGRLAKVAVELGLSLPDLAHAWVYDAPGVTSTVVGPRTLDQARAALAAADRPLPEEARARLDGIAAPGESRWLRVVERGVRRSRGGPDDAEENVSP

SEQ ID NO: 274 - DNA, 1065 bp, Micromonospora carbonacea africana
gtggagtaccgacagttgggccggtgtggactgcgggtgtccaaggtgtccctgggggcgttcaacttcggcggcccgaccgggccggaggaggccgccaggatcgtcgccacggccgtcgaagcgggagtcaacctcgtcgacacggccaacgtctaccaggacggccgcagcgaggagatcgtcggcgcggccgtgcggagctgccgggacgacgtcctgctggccaccaagatcttcaatccggtcggcccgggaccgaacgaccggggcacctcggcgtacgccctgaagcgggagtgcgagcggtcgttgcgccggctgggtaccgaccacatcgacctgctctacctgcaccgtcacgacccggacactccggtggaggagacggtgtccgccctcgacgacctggtccgctcgggcaaggtccgctacgtgggcacctccaccgtgcccacggcatacgagctggccgaccagccccggctgggcacggtgcccagctggcggatcgtcgacctgctgcgcacggcgcagtcccggggcgccgccccggtggtggccgagcagtcgccgtacaacctgctggaacgcgagatcgagcgggacgtgctgccgctgtgcgcggagtacggcctcggcctgttcacctacagcccgctggcgatgggtctgctctccgaccggttcgccgacggcgagccgccccgcgacgcccggttcaccgcctggtacgccccatcgggcccgcactggcagccggtgtggcggaccctgggccggttggcgaaggtggccgtcgagctgggcctgtccctgccggacctggcgcacgcctgggtctacgacgcgccgggggtgaccagcacggtcgtcggcccccgcacgctggaccaggcccgggcggcgctggcggcggccgaccggccgctgccggaggaggcccgcgcccggctcgacggcatcgccgcacccggggagagccgatggttgcgggtggtggagcggggggtgcggcgctctcgcggtggcccggacgatgctgaggaaaacgttagtccctga

SEQ ID NO: 275 - protein, 530 aa, Micromonospora carbonacea africana
MSQSRPAAAAPPARLPRRRAMVALVAVMIPMVLATLDNTIIGTALPTVVGELGGLSTLSWVITSYTLATAASTPVWGKLADMYGGKVVFVATLVVFLAGSLLSGMAQSITQLTVFRAVHGLGAGGLMVCAFAIMVEVLAGPDLPKYQGIMSATMGLTMVAGPLVGGLITDELGWRWCFYINLPIGAVALLIVVLMMHLPRRHTKARIDYAGAALLTVVSSCVVLVTTWGGITYPWASPMILGLVALGVLTCALFVVVERRVAEPLVPLAMFRSLNFTLSTLIAFLVGFALIAGLTFLALFQQAVQGASASDSGLLLLPLLLSMAAVNVVGGRLMSGGRSYRLLMLAGAALMTLSLLLFALMDVGTSRTVTAIPMVGFGAGLGLLMQTSLMVALSSVEMRNLGVAASTSTLFRTIGGAVGASATVSLFSVRVQSALADRGVADVADLLGHSARLDAAGLAQLPRAVRVHFMHAVASGTRWAFLMTVLAGLICVAAAWFLRRVTPLTSAPVAPEPARDVAAPAASSGRAPNY

SEQ ID NO: 276 - DNA, 1593 bp, Micromonospora carbonacea africana
atgtcgcagagccggcccgcggccgcagcacccccagcccgcctgccacgtcgccgcgccatggtcgcgttggtcgcggtgatgatcccgatggtgctggccaccctcgacaacaccatcatcggcaccgcactgcccaccgtggtcggcgagttgggcggcctcagcacgctctcctgggtgatcacctcgtacacgctggccacggccgcctccacgccggtctggggcaagctcgccgacatgtacggcggcaaggtggtcttcgtggccacgctggtcgtgttcctggccgggtcgctgctgtccggcatggcgcagagcatcacccagctgaccgtcttccgggccgtgcacgggctcggcgcgggcggcctgatggtctgcgcgttcgccatcatggtggaggttctcgccggccctgacctgcccaagtaccagggcatcatgtcggcgaccatgggcctgaccatggtggcgggcccgctcgtcggcggcctgatcaccgatgagctcggctggcgctggtgcttctacatcaacctgccgatcggggcggtcgcgctgctcatcgtggtgctgatgatgcacctgccgcgccgacacaccaaggcccggatcgattacgcgggtgctgccctgctcaccgtggtcagttcgtgcgtcgtgctggtgaccacctggggcggcatcacctacccctgggcgtctccgatgatcctggggctggtcgcgctcggggtgctgacctgcgcgctcttcgtggtggtcgagcgacgggtggccgagccgttggtgcccctggccatgttccgcagcctgaacttcaccctgagcaccctcatcgccttcctggtcggcttcgccctcatcgcggggctgaccttcctggccctgttccagcaggcggtgcagggtgcctccgcgtccgactccggcctgttgctgctgcccctgctgctgtccatggcggcggtcaacgtggtcgggggtcgcctgatgagcggcgggcgttcctaccggctgctgatgctcgccggtgcggcgctgatgaccctgagcctgctgctcttcgccctgatggacgtgggcaccagccggacggtcaccgcgatccccatggtcggcttcggcgcagggctggggctgctcatgcagaccagcctgatggtggcgctgagcagcgtggagatgaggaacctcggggtggccgcctccacgtccacgctcttccgcaccatcggtggggcggtgggggcgtcggcgacggtctcgctgttctccgtgcgggtgcagtcggcgctggccgatcggggggtcgccgacgtggctgacctcctcggccactccgcgcggctggacgccgccgggctggcccaactcccccgggccgtccgtgtccacttcatgcacgcggtggcctccggcacccggtgggccttcctgatgaccgtgctggcggggctgatctgcgtcgcggcggcgtggttcctgcgccgggtcaccccgttgacgtcggcaccggtggcacccgaaccggcgcgcgacgtcgccgcgcccgccgccagcagcgggcgcgcgccgaactactag

SEQ ID NO: 277 - DNA, 45055 bp, Streptomyces mobaraensis
atgccggcggctcggcggatcacctcacgcaacgctcgcttccagcagtggcaggcgctgctcggcaaccgcaacaagcggacgcgtgccggtgagttcctggtgacgggcgtccgcccgatctcgctcgcggtggagcagggctggcccgtgcacacgctcctcttcgacgggcagcggcagctctcgaagtgggcgaaggaactcctccgcacggtgcggaccgagcaggtcgcgatggcctcggacctgatgatggagctgggcgagaagagcgaggccccgcccgaggtcatcgccgtcgtggagatgcccgccgacgacctgggccggatcccggtccgggaggacttcctgggcgtgctcttcgaccggccgaccagcccggggaacatcggcagcatcatccgctcggccgacgccctgggcgcccacggcctgatcgtggccgggcacgccgccgacgtctacgaccccaagtcggtccggtcgagcaccggctcgctgttctccctgcccgccgtccgggtgccgtcgccggccgaggtgatggagtgggtggaggcccgccgggccggcgggacgccgatcgtgctggtcggcacggacgaggacggcgagtgcgacgtcttcgacttcgacttcacccagccgaccctgctgctggtcggcaacgagacggccgggctcagcaacacctggcgcgggctgtgcgaccacacggtcagcatcccgatgaccggctccgcgagctcgctgaacgccgcgaacgccgcgaccgcggtcctctacgagaccgtccggcagcggatcggtcagcggaagaaggccagcaactcccccagcagccgagggtagttgtagcgggcgcgcgcctgctcctggatccgtcccacgagttccgcgtgccgctcgaactcgcccgccagccggcccagcgtcgcggcggggtccgggcccagcatcaggggttcggctcccccgccgtacaggaaggacatgaattccgccgcggccggcagcaccggcagcgagccggacgcgagggtctcgaaggcccgggccgtgagcagcccggtgtcggcgacgagcgggctgaccagcaccggcgtgatcaccgaccggcccatctccgtgacgacgtgcccgaacggcaccggcggccggacgtcgacgccggccagccgttccggctcggcggaggtgatgtcctcgaacccggggcaggtctccccgtcccaccaccgtccgcagacccggatccgccgcagccgggcccgccgggcggcctccacgacctcgaggaacggctcccaccgcccccagttgctgccgatgtactggaggtcgcagtcccgctcgcggccgagttccagggggtgccgtaccaggcggggcattccgaaacacgggaagaactccgccccgtccggcagggggcccgccttgggctggaggacgagatcgccgagcgtggagtagagccgctgccactgctcgaccgggtgggtgccgacggaactgtcgccggcggtggcgacaccgccccagtggccgtcgaaatcgatgatcaggcgccggtggcggggaatggagccggcgagttcgatctgctcgtcggagaggtattgccgggcctcgaacatgaacaccaggtgcgttccccaccgcacgtccggctccaccggcaggtgtcgcgggatctgctcgtccattcgcgaaaggggaccgctgacccggacctcgcagcccgcctcacccgccgcttccacataggcggcgacggtctggctgaaccccgcctgccaatggaaattcccggctatgagcacccgggctcccgccattccgccctcccaagaacacacgtgaagccatcctggcgtggtgagtctagggaaaaggaactggggaaaatcccagcgcctcagaccgttcgggacccggcacgccgttcccgcccggcgctcaggggcaggcgtccagcacgtcggccgcccggaccagcacggccgaccgcgtcccgatcttcagccgctccagagcgggcaccggagccaccgggatcttccggctgcggtcggtgacggcgatcaccgcgtgcgcggggagcaccgacgcgagcgagcgcagcatgccggtcaccggctgcccgggcaccgcgccgtcccagtgcgtccgctcgccgtacggcaggtcggtcaggacgacgtcgggcgcggccccggccacgacggcggacagcgaacgcggatcgaagacgtccgcggcgccgacggcgtacggcagcgcgccgccgtccgcctccaggcggtcccgcagcctgcgggcggcatccgcggactcctggtacgcgggcttggcgaagcgctcgctctgctcacgccgctcggcctcgcgcgcggccagtcccccgggggagagcagggcgaggttcttggccgcgagttccagcggggcggggtccacgtcggaggcgatcacccgccgcagcgcgcggcggtgcagcagccccagcaccgtcaggaggtagccgctgccgcagcacgggtcccacagcgtcaccgggccgtcgtcggggagcctggcctgcgcccgcaggaagatctcggtcgccaggcggacggggaaggcggggtagcccggcgcggagtggagcacgacgccgcaggcgagatcggagctgtcgctccgctcgacggcgtggcggtacgaactcacctgtccactcccagcaactcggaaccgcctccgtcgcggcccttctgcgatcatatgccgcgcccggcgaagcccgccgccgccaccggcgcccgcacggcaccggcgcgtccgggatgtccatcgtcccaggtgaaacggggttgccgggtcggtgtccgggcggaatctctgaggttttcccgaacgcgtcccgccttaggatcggcgctctccgatgctgtagttgcgaggaagggcggccatgtccatgttcccggggttcccggacggaacgcgtctgctggtgaccggaggggcgggcttcatcggctcgcacctcgtcgacgcccttctggaggccggggccgaggtcaccgtcctggacgacctgaccaccggcgatccggagcggctggacccgcgggcggagctgcgccgcgtcgacgtggccgacgccgccgccctcggcgaggcggtgcggtccgtacgccccgacgccgtctgccacctcgcggcgcagatcgacgtccgggtctcggtggccgacccggccgccgacgcgcgggtcaacgtggaggggacgatcaacgtgctggaggcggcccgggccgtcggggcgcgggtggtgttcgcctccaccggcggggccctctacggggagggcgtcccggtcccgaccggcgaggacacgctgcccggtccgggcgccccctacggcaccgccaagtactgcgcggagcagtacgtcggcctcttcaaccggctgcacggaacgcggcacagcgtgctgcggctcggcaatgtgtacgggccccggcagagcccgggcggagaggcgggcgtcatcgccatccactgcgggctggcccgcgacggcgaggtgcccaccgtgttcggcgacggtacgcagacccgcgactacgtgtacgtcggcgacgtcgccgaggcgttcctcgccgccctccggcatcccgcgcccggcgtctggaacatcggcacgggcaaggggagcacggtgctggaggtcctcgaccacatcgccgccgcctcgggccgcgagctgcgtccccgcttcgcgccccgccggccgggcgagatccagcacagcacgctggacgtctcccgcgccgccgccgacctgggctggaccgcgtccgtcccgctggagaagggcatcgccgccacctacgactgggtccgctccggctcgcccgtccggcagcgggcctgacccggcgggccgggggtcgtcagggcccccggtccgccgcccgccggggcgtcacttgccgcgcaggcgcagcaggaggccgtggccgacaccgatcgcggtggcggcgccgtacaggcagaacagcaggggggtgcagcgggactcgggggcggtgcggtgccggtccagctccttgcggagacccgcgacggactggtggcgccgcgcctccgagtgcccctgccagtaggccctgcgcaggaggtagcggagggtcagccggccggggtcgatgtcgtggacgaccgcgtgctcgggcagcaggcgctccacggcgcccgcctccttcatcagcgcgatgaaggtggtgtcctcgccggactgcaggttgccgcccgtgcggctgaggcccaggtcgaaggtgaggccccggcggtgggcgaagtcggcgtcgacgcccatgcaggcgccccagatcttgacgggaccgcgggctcggtgccagccgacgaggtggtactggccggaggacaggaaccagggcagccggccgatgtcgtgcggcggtcgcagccgggccccgaccacgtgcgccccggcgcggaacgcggcgcggacggcgtccacggcggaggcgtcgaggcgcacgtcgtcgtcgacgaacaggatgtgccgcccggcgtactcgcgcagcaccgtgttgcgggacgccgacagcccgttcgtggcgccgaggacgcgcatcgtcccgccgccctcgttcacctgggcggcgaccttctcggcctccggggtgaccggccggtccagcaggaccaggtattcgtcgccgttcaactggtcgaggttgtgccgcagatgccggcgcacgttctccagacggaaggcacagaccgccaccaccatgggacgctgcccgggagtgccccggtccgcggtctctttcttgtccacagtcactccaggtatggctgcgttccgttggaggggcactggggagtgccggtatcgggattcattgtaggaaccgctttctaagaaatgcactagagaatcaacggccctgactgcattggctgctgttagtgttcggtgcgtcggccacggaacgactggacaggtgacggatgttggaagcggggcgcctcattcgggcggacgacccggtactgacctatcgcggtgcggtctccctccaggaggtcgacggcggaatactgccctggcgaataccttttcaggaacggcatctgttctttcccgagggcagcgtggggcgcgccgcgatgccgtcgggggtacggatcactttccgcacggacgcggcggggttcgccttccggtacgccgcccggcccgcccacgagatgccgggtccgcccgagaacccgcaggtggacgtgcgcgtggacggcaagccggtcgccagtctcccgctggtgaccgaccaggggatccacacctgccacgtcggatccctgccgggcgccggcgccggccgtctcgtggagctgtggctgccctgtctgaaccagttcaccctgcacggggtggaggtgccggcggacgccgaggtgagcgcggacaccaccagcgcgccccgctgggtccactacggctcctccgagtcccagggccggggggccctgtcgcccagccggaactggaccgcgaccgtcgccacggaactcggcctggatctcacgtcactggcgatcggggcgggctgctacctccagccgctcttcgcgacactgctccgtgatctgcccgccgatctgatcacgtgcatggtcggcatcaacatctacgggacccgggccctcaaccagttcacctaccggcccaacctgatcggcatgatccggatcatccgggagcggcacccctcgacgcccctgctcatcgcgtcgcaccaccactccccgtggcacgacccgctgaagggggacgggtacctgtcgctggtggaggtccgggagcagacccgcgaggtggtcgagctgctgcgcgcggacggcgacgagaacctccactacgtccacggtccgagcctcgccggccccgagaccgcccacctgtacgtggagccgaggcacctcgacccgctgcacttcaaccaggaggggcacgatctgctcgcggccgccttccggcgcaaggtcgaggagctggtgcccgggctggcgcgggtctagcggccgactcccttaccgtgcagggaggttgaccccggcaggacaccggagacggcaccgccggagacagcgccacggtggggcggcggaggcgtcggcgagcccgtgagcccgtgggcgaaggcgaccagtccggcctgcaggcgggactcgaccctgagtttcgcgaggatctgcgccatatgcgccttgacggtgcgctcggtgaccccgaggaacgccgcgatctcgcggttggagtagccatggctcagcagggagaagacctggagctcgcgctcggagagcagatgcacctggcccagcccttccagccagggaaaccgctcctcgtcgaggactcggtcgtcggcatcgccggcgtccccgacatcgccgacggaatgacccgtgtcgcattcggaatacagcaaagtggccccccgtatgagcctgtggtccttgcatcccctgagagcatccgacgcatcacgtaccgcggcaccgaaaggccaccgccgcacaatgaagtcgcgccgcactaccacctaagcgacgaatgaccctggacataacccactcggatcatcttatcgcatccacggccaggttccttggtgttgccaaccgatatgcgcggggtgggccggcgcgtcggacaaggcggcttgcaccctgtgggtcggcgacaattccgttgccaggaaggggacttcacgcccgtcctgcgccactgcggcagcgggcggcatcaaagccggtttcgacaaactcacatcggccgtatgcgcgttttgtccacctcggctacgaagccgcccgctatcgcccgcggcggcggctcaattgatgcgatcctgcagaaccctggggggccacgcctccgatcccaggattcccagcgcgtacgccttggcgacgagcgcggtgcggttgggcacccggaagcggtccatcatcttactgacgtgatactcgacaccctgccggctgaggtagagcttgtttgcgatgcacgtggtgcgctcacctgcggcgatgcgctccatgatcttggcgtccagcgtggataacgtcatgggtgcagtggtcacctggtactccctgaggggaagagtgccgagaagggtggagtgccgaagacggacccgggcaagcgctgagagggaagagcgcccggcggaccccggggccggcggcgggtccatttctacccacaagttcaacacggcgagtagtggacttttgtacaagtggaagccgccgttctccgatattggattgttcgagcaaatgggatgtattccggcatcccacactcatacgaccgacggggcgcaccgcccgcgacccacaccgccacatgtccgttctggccgcataaccccaggtaacggggcggtagggcatccgggtgcacgcggcgcccgcagcgggccgacggccggacccggggccgccggcccgcaggactagcaaattcctcatacatgtacgccttatcctcaacgcctgcgaatctgtggcggaacgaggggagacggcatgaaaatcgaggtgctccaaccgacctgcaacctggacacggtgcgggacggtcgcggcggaattttcacctgggttcccccggagcccatcctggaattcaatatgctgcacctgtacccgggaaaggtgcgcggtctgcactaccacccgcacttcgtcgaatacctgctcttcgtcgagggctcgggcgtgctggtcaccaaggacgacgccgacgacccgaactgcgaggaagagttcatccacgtctcgcgcggcatctgcaccaggacgcccgcggggatcatgcacgccgtccacgccatcacgccgctgacgttcatcgccatgctcaccaagccctgggacgagtgcgacccgccgctggtccaggtcgagccgctgccgcacaccctggagcgcaggtgagggtcgcggtggtcggcgccggcggcttcgtcggcaccgccatcacccgggcgctgggatccgcggcggtccccgtgacccgtgcgacctacgaggaggcccgccgcagcggccccttcgacgtcctcgtcaacacggcctgcccgtcccggcgctactgggcccggcagcaccccgacgaggaccgccgcgagaccgtcgacaagacccgggcgctcctccgcgactgggagtggggccgcttcgtgcagatcagcaccatctccgcgcgcacccaaccggacaccccctacggcaggaaccgggccgaggccgaggaactctgcgcggaccacctgatcgtccgcctgggtccgatgtacggcgacgccaacaccaagggcgtcctcatggacttcctcggggaccagccggtctacgcgcacggcgattcgcggcagagcttcgcgccggtcgactggtgcggccgctggatcgcgtcccacctcgacgccgagggcctgtgggaagtgggcgcgcggacgacggtcagcctgcgggagatcagggacgcggtcggctcgcgctcggtcttcgccggcacacggaaggacgaccagttccccctggtcagccggcccgactggccggacgccgcggatgtcatcggctggctcggggcccgtagcagagcactgactggagaatcatgaccacgaccggtcactcgacggtgatcgaccgttgccggatctgcgacaacaccgagttgctgcccgtgctcgacctcggtccgcaggcactcaccggggtgttcccgcggacccgcggcgaggacgtcccgtacgtcccgctggagctggtgcgctgctcgcccgccggctgcgagctggtgcagctccggcacaccgccgacttcgacctcatgtacggcgagggctacggctaccggtccagcctcaaccgctccatggcggaccacctgcgcggcaaggtcgccgccatcacccggctggtcgacctcggccccggcgacctggtcctggacatcggcagcaacgacggcaccctgctgtcggcctaccccgcgggcggccccgccctggtcggcgtggaccccgccgcctccgtcttcgccgagacctacccgccgggcgccgagctgatccccgacttcttcgccgccgaactgctcggcgagcgccgcgccaaggtcgtcacctcgatcgcgatgttctacgacctgccccgtcccatggacttcatgcgcgagatccgccgcgtcctgacggacgacgggatctgggtgaccgagcagagctacctgccgtcgatgctgcacgccgccgcctacgacgtcgtctgccacgagcacctggactactacgggctccgccagatcgagtggatggccgaacgcaccggcctgaaggtcgtggacgccgagctgacccccgtctacggcggcagcctctcgctcgtcctggcccggcgcgactccccgcgcgaggtcaacgagccggccctggcccggatccgcgccggcgagacggacctgccctacgccgagttcgcccggcggaccgaggaatcccgcgaccggctcgtggacttcctcaccacctcgcgggacaaggggctgcgcaccctcgggtacggcgcctccaccaagggcaacgtcatcctccagtactgcggcctggacgagacgctcctgccgtgcatcgccgaggtgaacgaggacaagttcggctgcttcacgcccggcacggacatcccgatcgtctccgagaaggaggcccgggcgctggagccggaccggttcctggtcctcccgtggatctaccgggacgcgatggtcgcccgggaacgcgacttcctggcggccggcggcaacctggtcttcccgctgcccgccctggaagtggtgtgacgcggtgccggggatgagaacgcgcggcgcccgcccgctcgccatctgcctgctgtcggtgctgccgctgctggccgcgggcctgctgctgtggcacggcgccgcgggcaagggcggcgggcactccgggtccgggggcgccgcgcggggcggaccccccgtcgaggcgtggcggttgctgctcgccctcgccgtggtggtggccgtcgcgcggggcctcgggacgctggcgagccggtacctggggcagccgcgcgtggtgggcgagatggtctccgggatcgtcctgggcccctcgatgctcggcctcgtcgccccccgcgcctacgacgccctcttccccgccgccctccacgcgtacctcaacctcgtcgcccagatcgggctggcgctgttcatgttcctgatcggcatggagttcggcgagacccggcacgaggacacgggccgcaccggcgtcgccgtgggactcgtcggcgtctgcctgtcgttcgggctcggctgcggcctggggtacgcgctgtacaccggctacgccccggagggcgtcggcttcctgccgttcaccctgttcctgggcctggccatgagcgtgaccgccttccccgtactggcccggctgctgatggaacgcggcatgctgcagtcccgggcgggcgcgtacgccatcgtgggggcggccaccgccgacctcgcctgctggctgctgctcgcgggcgtcgtcgcgctgctgcgcggcggttcgccgctgggcgtgctgcgcaccctcgcgctgaccgcggccttcttcggcgtcatggtggtggtcgtccgccccgccctgcgccgcctcctggaacggcccgagcgccggctcgccgacggcggtgtactcaccctgatcatcccgggcgtcctgctgtcggcggtcgccaccgagctgatcggcatccacctcatcttcggcgccttcctcttcggtgccgtctgcccgaagtcgacgccggtcctggagaacgcccgcggcaaactgcaggaactcgtcacggccgtgctgctgcccccgttcttcgcctcggtcggggtgaagaccgacctgctgcggctcggtgacggcggcggggccctgtgggtgtgggccggtgtcgccctcctcgtcgccgtcgcggggaagttgacgggcagcgcggccgcggcggcgctgatgtcggtggaacgcgtcgacgccctgcgcatcggcgtgctcatgaactgccgcgggctgaccgagctggtgatcctcaccatcggactcgacctcggcgtcctgtcgccggcgctgttcaccatgctggtcgtggtcaccctgtgcgccaccgtcatgaccgctccgctgctcgacctgctggaccgcgcggaggcgcgccgcgccgcgcccgctcccgcgaaggcggcggccgtggcccgctgaacgggacccggcggaaaacgaattcagaacacgaattgccgggcgaggtctaggtgattccttcaaaaatgccgacgggtcgctgactatgatcggcacggaatgacctgctgtgcgcgccggtccagtaaacctgaaaacagggaggtgggttggtgcagatagccgacctgtacatcggtgctctcggcgtattcgtaccgcccgtggtgagcgtcgaatgggccgtggaacgcggcctctatccggccgaggaagccgaggcgcacgaactcggcggggtcgccgtcgccggcgacatcccccctccggaaatggccttgcgggcggcgcagcaggcggtgaaacggtggggcggatcgccgaaggaattcgatctgctgctgtacgcgagcacctggcaccagggccccgacggctggccgccgcaggcgtacctgcagcggcacctggtgggcggggacatgctcgccctggagatccggcagggctgcaacggcgtcttcagcgcgctggaactcgccgccgcctacctgcgggccgatccggaccgcacgagcgcgctgatcgtcgccgccgacaactacggcacgccgctggtcgaccggtggcggatgggtcccggcttcatcggcggcgacgccgcgtcggccctggtgctgaccaagcggcccggcttcgcccggctgtgctcgctggcgtccaagggcctgccggagatcgagtcgctgcaccggggcgacgagccgctgttcccgccgagcatcacccggggccgtccgaccgacttcagcgcccgcatcggccagcagttcgccacccggagccccgcctccctcgcgatggccgacatccaggaccacatgaccgagatcgccgagcgcgccctggcgggggccggcatcggcatggcggacgtcgcccgcgtctccttcatgaactactcccgggaagtggtcgaacagcgctgcatggcggcctgggggctgccgctgtcccgttcgacctgggagttcggccgcggcatcggccactgcggggccagcgaccacctgctctccatggaacacctcgtacggaccggtgagctcgcccccggcgaccacgtcctgcaactcgccaccgctcccggcctcgtggtgtccagcgccgtccttcaggttctcgaatcgccggactgggacgcatgacgaataccggcaacgacgaacggaacacgcccgtgacacccctcgcacacccggcagactcccttcccccggtggccgtggtcgggatcggctgccggttccccggcggcgtcgaatcccccgacgggttctgggacctgctggcggccggccgcaacaccgtcggcgacatgcccaccgaccgctgggaggagtaccgggacttcggcccgcgcttcgacgcggcgctgcggaaggccatccgcgccggcagctacctggacggcgacatcgcgggcttcgacgccgagttcttcggtatctccccgcgcgaggccgagctgatggacccgcagcagcgcctcatgctggaggtgtcctggcaggcgctggagcacgcgggcatcgcgccgcacaccctggcggggaccgacaccggtgtgttcgccggcgtctgcacctacgactacggcgccggccggctggaggacctgccgggcatcgacgcctggacggggatcggcgcggcggtgtgcgccgtgtcgaaccgcgtctcgcacgcgctcgacctgcgcggacccagcctctccatcgacaccgcctgctccgcctccctggtggcgctgcacaccgccgcgcagagcctgcggctcggcgagtgctccgtggcgctggccggcggcgtcaacctgctggtgtcgcccggccagacgatcgccctgggcacggccggcgcactggcgcccgacggccgcagcaagccgttctccgcgtccgccgacggctacggccggggcgagggctgcggcgtgctggtcctcaagctgctggcggacgccgaacgcgacggcgaccgggtgctggcggtgctgcgcggcagcgcggtcaaccaggacgggcgcaccaacggcatcatggccccctgcggtcaggcccaggagcacgtcatgcggcgtgccctggcggccgcgggcgtcgacgccggcaccgtcgacttcgtggaggcccacggcaccggcacccgcctcggcgaccccatggagatcggcgcgatcggcgccgtctacggagcggaccgcgccggcggcgagccgtgcgtggtcgggtcggtgaagtccaacatcggccacctggaaggcgccgcgggcgtcgccggggtcatcaaggccgtcctcgccctggggcgtgaccacatcccggccaccctgctggacggcgaccccaaccccgagatcgactgggacggccacgccatccggctggccaccggggccgtgccctggcccgagcgcccgcacccccgccgcgccgccgtctccggcttcggctacggcggcaccgtggcccacgtcgtcctggagcaggcgccccccacgcccgcccgtcccgcgccggagccggccgggaccgtgttcccgctctccgccgcctcccccgaggcgctccgcgcgggcgccggcgcgctcgccgagcgggtcgaggcgggcctggaccccgccgcgctcgggcacaccctggcccaccggcgttccccgctcgcccaccgggcggccgtcgtggcggccgaccgcggcgaactggccgccgggctgcgcgcgctggccgccggggagccggcgcccggcgtcgtcaccggggcggcgctgccggacaccgcccgtcccgtctgggtgttctcgggccacggctcccagtgggccgggatgggccgggaactgctggagtccgagccggtgttcgccgcggcgatcgacgagctggagccggtgttcaaggaggagatcgggttctcgccccggcagacgctgctggagggcgaccacaccgaggtccaccgcgcccagaccatgatcttcgcgatgcagctcggactcgccgcgctgtggcggtcccggggcgtcgagcccgccgccgtcatcggccactcggtcggcgagatcgccgccgccgtcaccgccggcgtactgaccacggccgacggggcccggctgatctgccgccggtcgctgctgctgcgcgaggccgccgggcgcggggcgatggccatggtgaacctgcccttcgacgaggtcgccgagcggctcgcggggaacggcgcggtcgtcgccgccatcgcgtcctcgacgtcgtccaccgtcgtctcgggcgacccggaggcggtcgacgaggtcgtcggccgctggaccgacgaggggctggtcgtccggcgggtcgcctccgacgtggccttccacagcccgcacatggacccgctgctcgaccggctccgcgcggcctgcgccgagctgcggccgggcaccccgcacacccccctctacacgacggcgctcgcggacccgcgggccgcgatggccgccgacggcgcgtactgggcggccaacctgcgcaacccggtgcggctcgccgcggcggtcaccgcggcggccgaggacggccaccgggcgttcgtcgagctggccccgcaccccgtggtcgcgcactcggtccacgagacgctggccgagcgcggcgtggaggacgtgttcgtcggcacgacgctgcggcgcgacaagcccgaggcgcggaccttcgacgcggccgtgggcgcggcccactgccacggcgtgaccgtggactggccggcgctccagccgaacggggacctggcgaccctgccgccgtacccctggcagcaccgctcgctctggcgctccatcgccgggtcgcggacggcaggacgcggccacgacgtcgcgtcccacaccctgctgggcacccccgcggccgtggccggcagcgaactgaggctgtggcacagcacgctggacgacgacagccgcccgtacccgggcagccacgccctcaatggcgtggagatcgtcccggccgccgtgctggcggtcacgttcctgaccgcggcggccgaggacggcgaaccccgcgccctgcgggacatgacgatgacccacccggtgctcacggccggtcagcggcagatccaggtcgtccacgagggcgacgtggtccggctggcctcccgtacggtcgcggacgcgtccgagccgaaccccgcctggctcgtccactgcgcgtccggcaccgccgcgccggatctcgccgccctggcgtcgcgcacgctgctggacccggccgagcaccggctcgaacccgccgatcccggcctggtcgcgcggcggctggccgaggtgggcgtgccctcgaccggtttcgactggaccgtggagagcctgtccgccggcttcggcgtgctgcacgcccgcgtcgcctcgccggagaccggttcctgggccccgctgctggacgccgtgatgtccatcgcgcccgccgccttcatgggcctcccccaactccgcatggtcgtccaggtggacgagatcaccgtccacggcacgcccccggacgcggcgacggtcgaggtcgtgctcgatcccggcgtcaccgacaccgtgcacgccctggtcaccgacggggacggccgcccggtggcgagcctgcgcggcctgcgctacccggtggtcgagcagccggccgcgccggccgccgacgagccgggccgggaggcggacgcggacgcggtgtcgttcgcgggcctggcgccggacgagctgcggcagcgggtgctcgacgaggtgcgcgcgcagatcgcgcaggagatgcggctggcccctgcggacctgcacgtccgccgcccgctggtggagcaggggctggactcggtgatgacggtggtcgtccgccgccggctggagaagcgcgtcggccgggacgtgcccgccaacgtcttctggaagctgcccaccatccgcgacatcgccgaccacctgaccgagcggctcgccgaggtcccggccgaggacgtcccggcgtcctgattcacgaacggtgcgacgtgctccaaggggtatggaggcgggggtgaataccccgccgccatcggccccgaaacctagggaaaacccgaaggacgcgccactacgatcgttcttgagcggagaaagccaatgccacctggagttcccttgaaacgagtcgagccaacgacgctgatcgtaaggtgcgggatatgaaggcgctcatattggtgggcggggtcggttcgagattgcgcccgatcacgcacacctcggccaaacagctgattccggtggccaatatccccgttctctcctatgtgctgaattccatcaaggaggccgggatatccgaggtcggaatggtcgtcggggccaccgccacggagatccgggccgccgtgggggacggcgcgcagttcgggctgaacgtcacctacctccagcaggacgccccgcgcgggctggccgacgccgtgctcatctcccgtgacttcctgggcgacgacgacttcgtcatgtacctgggcgacaactacgtcgtggacggcatcgtcgacttcgtcgaggacttccgccgcgacaaggccgcggcgcaggtcatgctcgcccgcgtcgacgacccgcgccggttcggcgtggccgaactggacgtcgacggccgggtgaccgccgtcgtcgagaagccccaggacccgcggagcgacctggcgatcgtcggcgtgtacgccttcagcccgctggtgcacgaggccgtggccggcatcaagccctcctggcgcgacgagctggagatcaccgacgcggtgcagtggctggtggaccaggggcaccgggtcggctccacggtcatcgaccgctactggaaggacatcgccggcgtcgacgacgtcctggagatgaaccgccacgtgctggagaccgtcgagggacgcgtcgacggcgaggtggacgaggccagcgagctcgtgggccgcgtcgtggtggaggccggggcgaaggtcaccggatcccgcatcgtcggtcccgccgtcatcggcccggacaccgtggtgcaggactcctacgtcggccccttcacctccatcgacgggaactgccggatcacgcacagcgagatccagtactccatcgtcctgcgcggcgcctcgatcgagggcgtcgcccgggtcgaggactcggtgatcggccgcgagaccgaggtgaacgccgccccccggacgtcgaccgcgcaccgcctggtgctgggagaccacagccgggtccgggtcggctgttgagcgggattgcggaaacgggggacgcgacggtgatggcgggcagcgaggacgagcgggacggcggcacgggcgcggagcggggcaggagcgtcctcgtcatcggcggggcgggcttcatcggctcccactacgtgcgcgaactgatccgggacggcggcccggcgcgggtgaccgtgctggacaagctgacctacgccggcaacccggccaacctggacccggtcgccggccggtacaccttcgtccacggcgacatctgcgacaccgggctgctcgccgacgtcgtccccggccacgacctggtggtcaacttcgcggcggagtcgcacgtcgaccggtcgatcgccgacgcggcccccttcatccgcaccaacgtgctgggcgtccaggccctgatgcaggtgtgcatggaggccggcacgcgcaagatcgtgcaggtctccaccgacgaggtgtacggcagcatcgagaccggctcctgggacgaggacgcgctgatcgcgcccaactcgccctacgcggcctccaaggcgggcggcgacatggtcgccctggcctacgcccggacccacgggctgccggtgagcgtgacgcggtgcggcaacaactacgggccctaccagttcccggagaaggtcgtcccgctgttcaccacccggctgctggacgggcacggcatcccgctgtacggcgacggcggcaacgtccgcgactgggtgcacgtctccgaccacgtccgcggcatccggctggtcgccgagcgcggcctgccggggcaggtctaccacatcgcgggcaccgccgagttgaccaacctggagctcacccggcacctgctggacgcgctgggcgccgactgggaccgggtcgagcgggtggccgaccgcaagggccacgaccggcgctactcgctctccgacgcccggctccgcgcactcggctacacgccccaggtgcccttcgagcagggcctggccgacaccgtgcgctggtacgccgagaaccgggactggtgggagccgctcaacgagcgcgcccgttccggggccgcggcaccggccgtcgtcggctagccgccgcaccgggcgccgctcacggcgtcccccttccctgacgtaatccccatttcgcgtgacatccaggagtttttgatggcgcactgtctggtgaccggcggagccggcttcatcggctcgcacgtggcggaggccctgctcggcctcgggcaccgggtgtcggtcctcgacgacctcagcggcggcagcgccgagcgcgtacccgacggtgcggagctgttcgtcggctcggtgaccgacgcggagctggtcgacaagctcttcgccgagcagcggttcgaccgcgtcttccacttcgcggcgttcgccgccgaggccatcagccactcggtcaagagcctcaactacggcaccaacgtcatgggcagcgtgaacctcatcaacgccgccctgcaccacggggtctccttcttctgcttcgcctcctcggtcgcggtgtacggccacggcgagaccccgatgcgggagtcgtcgatcccggtcccggccgacagctacggcaacgccaagctcacggtcgagcgcgagctggaaacgaccatgcgcacccagggcctgcccttcacggccttccgcatgcacaacgtgtacggcgaatggcagaacatgcgcgacccgtaccgcaacgcggtcgccatcttcttcaaccagatcctgcgcggcgagccgatctccgtgtacggcgacggcggccaggtccgggcgttcagctacgtgaaggacatcgtggacgtcatcgtccgcgcccccgagaccgaggccgcctggggccgggccttcaacgtcggctcgtcccgcaccaacaccgtgctggagctcgcccaggccgtgcgccgggcggccggcgcccccgaccaccccatcgcccacctgccggcccgcgacgaggtgatggtcgcctacaccgccaccgaggaggcccgcgaggtcttcggcgactgggcggacaccccgctggcggacggcctggcccgcaccgccgcctgggccgcctccgtcggccccgccgagctgagcccctcgttcgacatcgagatcggcggggagcacgtcccggagtgggcgcagtgcgtggccgaccggctcagcgccgccggccgctgagcccgcccctccttcccccttccccccttttccggccgcccccagcccgtcccgcgccgcaacgcacctgatagtggaggaacaccgcagtgaacgatcttgaaatccagcgtcgggtacgcgagctcgagccgtgggtgaacgacttcgtctacaacggggtccggtacgccaccgcgtccacccgcgactacctgctgagccagcccccgcaggaccgggccgacgccttcttcggcgcgttcccgcaggccaagcgggtcctggagctgggcgcgctggagggcgcggacaccctggcgatggccgggcagccgggcgtcgagatcctcgccctggagggccgcgaggagaacctgcgccgcgccgagttcgtcatggagctgcacggcgtctccaacgtcgaactgcgcctcgccgacgtggagtcgatggacttcgccgccctcggccacttcgacgccacgctgtgcgcgggcctcctctaccacgtgcagcgtccctgggagctgctcgcggacatcggctccgtctccgactgcctctacctctccacccactactggggcagctcggagggcctggacgtcgtcgacggctacgcgttccacccggtccgcgaggaccaccccgagccgcaggcccgcggcctcagcgtcgacgtgcgctggctggaccggccgtccctgatgcgcgccctggagcgggcgggcttcaccgacgtcgaggtcctccaggagcgggtcacccccgaggtctgcaacatcgtcacggccgcccgcaagcccggcgtgccccgcccgtgacacgacgaggacgaggcgaagggaccgaaagggagtggatgaccccatgaccacggcgacacacgaccgcgccgaggcgatcgagcggttccggcgggacggcttcgcgaacgcgggcccggtcctcgacccggacgcgatcgggcgcctcaaggcgggagccgagcggctcatcgcccgcttcaccgacgagggcctgcgttccgacgactactggaacttccccgtcgagggtgacgagcgccccgtcctctaccgcgtgcacaacctggagaagcaggactgggcgccggagcgggacctgctgcaccgcgaggagctggccgcgctggcgtccgcgttcgtggacggtccggtcgtccccaccgcctacgcgctcgtcctcaaggagccgtaccgggccgccgaggtgccctggcaccgcgaccgcgtcaacgtcggcccgcgcacggtctgcaacctgagcatctgcctggacgacgcgagcccggagaacggctgcctgacggcggtcccggggtcgcacctgctccccgacgacgccgtggtggcggaggtccgcgccgccgggcccgtcgtccaggtcccggtgagccagggcgacgtggtggtgcacgacgtccggctcgtccacggttccggcccgaacgccggcggccgctggcggcggaccatcgtcatcgagtacgccgacccggccgcaccgccggcgccctgagccgcaggccaggcagacatcgaacggcaggtcagggagtctttcggatgaggattatgttcaccgcctcgaactgggcgggacattacatgtgcatggtgcccctggcctgggcgctgcgcggcgcggggcacgagatccgcgtggcgtgcccgccgtcgcaggtgcgcggggtcgccgcggccggcctgatgccggtcccggtgctggacgcgccggacatgatggagagcgcgcggctggcgttctacgtgcaggccatgtacacgccgccgcagtccggcccgcggccgctgccgctgcacccgttcaccggggagccgatggagtcgctcaacgacttcgacgcctccgacctgcgggacttctggcagaagtcgatcgacgcggtgcagcgcagctacgacaacgcggtgagcttcggcgaccactggaagcccgacctcgtggtgcacgacatcatggccgtcgagggcgccctggtcgccgccctccggggtgtgcccagcgtctacgtctcccccgggttcatcgggaccgtggagaccgagccgggcctcgacctggtctcggcggacccgctgtcgtgcttcgagaagtacggggtcgactggggccgcgaccggatccggtacgcggtggacccctcgccggactcggcgatcccgccgctcggcgacgcgctgcggctgcccatgcgctacgtgccgtacaacggcgcgcagtcggccgacccctggcagctgggcccgatccgcggcaagcgcgtctgcgtcgtctggggcaactcggcgtcgggcatcttcggctccgacgtccccgcgctgcggcacgccatcgacgcggcggtggcgcagggcgccgaggtggtgctcacggcgccgccggagcaggtggagcggctgggctcgctgcccgacggcgtccggctgctgcgcaactgcccgctggagctgatcctcccctactgcgacctgctcatccaccacggcagcgccaactgctacatgaacggcatcgtggcggggatcccccagctctccctcgccctcaactacgacacgctggtctgcggccgccgcgtcgaccccaccggcgccacggtgaccctctccggcctcgaggccaccgccgagaagatcgacgaggcgctgcgcggcgcgctgttcgaccaccgctaccgccttgcggcggagaagctccgggacggcgtcgagcgggcgccctcgcccgccgcggtcgccgggctgctggagcgcctggtggcggacggcgggctgacggcggaggacgtcgccgagaccgtcaggaacgccaacgaggttcggagggtcgcgtgacgatcggactcgagaagggccagcgggccgtcgtcaccgggggcgccggcttcatcggctcccacctgtgcgaacggctcgtcgagcggggcctgtcggtgatcgccgtggacaacctgtcgaccggcagggcctccaacgtcgaggcgctggccgacgaggagcggttcacgctgctgcgggccgacgtgaccgagccgttctccgtcgagggaccggtccaccacgtcgtccacctggcgtcgccggcgtcccccctggactacctggcgctgccgctggagacgctgcgcgtcggctcggccgggaccgagaacgcgctgcggctggcggtcgagcacggcgcccgcttcgtggtcgcctccacctcggaggtctacggcgaccccctggagcacccgcagcccgagagctactggggcaacgtcaacccgatcggcccgcggtcggtgtacgacgaggccaagcggttcaccgaggcgctgaccgccgcctacgcccgcacgctgggcgcggacaccggcatcgcccggctgttcaactcgtacggcccgcggatgcggcgcgaggacgggcgggtggtgccgaccttcatcgaccaggcactcgccggcctgcccctcaccatcaacgggaccggcgagcagacccgttcgctgtgctacgtcgaggacaccgtgcgggggctgatggcgctgatggagtcgtccttcccggggccggtcaacctcggcgcgaccggcgagatgaccgtccgcgagatcgcggaggcgatcgccgcgcacgcgggcgtggagctgcgcaccgagtaccggccgcccacggaggacgagcccggccggcgccgccccgacatcgagaccgccaggacgaagctgggctggcagcccgaagtgccgctcgccgagggcatcaagcgcaccctcgactggtggcagaccgcctacccgcgggacacggcccgcgacggcgcccatggtacgagcgacatcaggagtgaggcggcatgaccagcgagacaccggccggcaagggcgtgcgcatgccgcggagcgtcgaggacctcaacgtcgtctgggagtgggacgacgccgaggggatgcaggtgcggctcgccggctaccagccgcgcgacgagtacctgcgcgaccgcgccgagcggatcggccagttgacggaggcgctgtccctgcaccagggcgtcgacctgttcgagatcggcagtggcgagggcgtcatggcccgcgagctggcgccccgggtcaacagcctgctctgcgcggacgtcagccagtcgttcctggacaagacccgcgccacctgcgcgggcgtcccgaacgtcgagtaccaccacattcggaacgactacctggccgggctgccggacgcctcgttcgacgccgggttcgcgctgaacgtgttcatccacctgaacgccttcgaggtctacctctacctgcgcgagatccgccgggtgctgcgccccggcggccggttcctcttcaactacctggacttcggcgacgtcaccaggccgcagttccacgagtacgtggcgagctacccgggcgcccacccggtggccgtgaagggcttcatgtcctggctcggcagcgacgtggtcggcaagctcgcggcggaggccgggctgacgcccgtccccgggtcgctggtggaccagggcggcgtctgcttcctcaccctgcgcagggacgacgaaggggcgaccgcgtgaagtcccttaccccgctcgcgcgctcggagaggacggtccgcggtggctgagccgatacccgtcgaccggctcaacgagtggtacgacgagctcaccgtcgagatcatcgagcgggtctgcgcccccgactccggctgcctggacatcggcgccggaggcggcgagatcctcgcgcacatgcgccgggccgcccccgagggccggcacttcgcggtcgagccgctgccgcactacgcggaggggctgcgccgggacttccccgaggtcacggtgtggcaggccgccgcggccgacgcccagggccgggacagcttcgtccacgtcgtctccaatcccggctacagcggcctgcgccgccggccgtacgaccgcgccgacgagacgctcgtggagatcgcggtggacaccgtccgcctcgacgacgtcgtcccggccgacgcccgcgtcgacctggtgaaggtggacgtggagggcggcgaggtgggcgccctgcgcggggcggccgagctgctgcgccggcagtcccccgtcgtggtcttcgagcacggcggcgaccacgcgatgcgcgactacggcaccaccagcgacgacctgtgggccctgctggtcgacgacctcggctacacgatccacaccctcgcgggctggctggccgcggagccgggcctcgaccgggccgccttcgccgccgagctgcgcacccagtggtacttcgtcgccgcccgcgggcccctgcccacccgttcccacgaggagtagtgcatccgtcgtgaccgacacacccgccccctcccgcccctcccccgcggtccccgaatgccacatccggaagaccggcctgctccccgagcacatcaccgccttccggcgcgagggcgtgctggccgtgcgcggcctgctgacccccgccgaactggaggcggcgcaggaggcggcggccggcctgatcgacgacgcctggcgcacccggtccccgcacgacaccatctggacgctggagcccgacgaccccgacgctgccccggtccgcatcgagtacgtcatggacaagtccccggtactggcccggctcgccggccacccgctgctgctgggcgccatggagtcgctggtcggccccaacttcatcccgacctgggacagcatggtgttcaagaccccggcgggcgcgccccggctggcctggcaccgcgacggccagatgtaccgcgacgccgtcgccgtcaccggcggcggccgggtcatcgacgtgggcgtctacctggacccggcgcccgaggacaactgcgtctgggccatcccgcagtccaactactgggacgacgagcggatcaccgagaccgccgaccggatgaacgccaccgagtgggacacgaccggggcagtccccgccgtgatggagccgggcgacgccctgttccacaacatcctcaccctgcacggcgcccccgcggtggtcggcaagcagcgccgggtcgtctactacgagtaccggcccggcgaggtggagcgccaactcggcccgcacacccccgagtacgtggggctcaagcagcaggtgctgcgctcctgcctggagcagcgggccgcggccgaggagcaccggggcgaggagcccttcgcgtaccgcccggcggagcagtaccggctgtgggacgagtcccccgccatctccggcctgcggttcccgcacgaggagtactggcggtggtgagcctgctgaaccggctgccgctggtgggggccctcaccggagccccggcccgcccgcgccgcgaacccacccacgacgagatcgtcgccgagcgctaccgcgagcggaccgacccgcgccccggcgactgggcctacgcccacctgctcgacctccgcgacgcgctggccgaggagctccgcggggcgtccggccgctggctcgacttcggcgccggcacgtcgccctaccgcggcctgctcccgggcgccgagctggagaccgccgagatgcgcggcggcgaggacctgaccgccgaccacgagctggacgcggacggcctgagcgccctgccggacggctcgttcgacgggatcctctccacccaggtcctggagcacgtgacggacccggacacccacctgcgggaggccctccggctgctgcggcccggcggcaagctggtgctgtccacgcacggggtgtgggaggagcacggcggccaggacctgtggcgctggacggccgacgggctcgcggcccaggccgagcggtccgggttcacggtggaccgcgcggtcaagctcacctgcggcccccgcggcctgctgctcctgctgcgctaccacggccggcagcacggctggccggccggcgggccggtgggactgctgctgcgcaccctgacgctggccgaccggctgcgcccgcgcctcgtcgacgactacctggaccgcgtcttcggcggtctgggacgcgtcgagggcccggccgagcccttctacctggacatcctgctgaccgccaccaagccgagcgcaccggagacgccggagagggacgcgaaatgacccagcccccgcccagccccaccatgtgcgtgctgccgtggatccacatgtgcgcctccatcgacggcgtctacggccggtgctgcgtggacgactccatgtaccacaacgagctgtacgagtccgtggacgagccggtcttcaagctcaacgccgacgccgtcggctgcgcgcccaactcccgctacgccaaggacaacccggacgaggtacgcgggctgacggaggcgttcaacagccccaacatgcggcgcacccggctgaagatgctggccggcgagcgggtgtccgcgtgcgactactgctaccaccgcgaggaccggggcgcgacctcgtaccggcagagcatcaacgagcggttcgccgacacggtggacttcgccgacctggccgaacggaccgcccccgacggctcgttcgacgagttcccgttcttcctggacatccggttcggcaacacctgcaacctgcggtgcgtgatgtgcgcctacccggtcagctccggctggggcgccaagaagcggccgtcgtggtcgtccgcggtgatcgacccgtaccgcgaggacgaggagctgtgggcgacgctccgcgagaacgcccacctcatccgccggctgtacttcgccggcggtgaaccgttcatgcagccgggccacttcgcgatgctcgacctgctgatcgagaccggcaacgcgggcaacgtcgacatcgtctacaactccaacctcacggtgctcccggagaaggtcttcgaccgcttcccgcacttcaagagcgtcgggatcggcgcctcctgcgacggcgtcggcgaggtcttcgagcgcatccggcagcccgcgaaatgggacgtgttcgtcgccaacgtccgccgggccaagaccgaggtgaacctctggctccaggtcgcgccccagcggctcaacctgtgggggctgcgggacctgctgcacttcgcccgcgaggagggcctcgacgcggacctcgccaacgtcgtgcagtggcccgacgactactccgtcgccaacctcccggacgaggagaagcggcgggcgaccgtcgagctggccgacctggccgagtggtgcgacagcctggactgggccaagcccgccaagcacctgcgggcgctgagcgcgttcatgaacgccgccgacccgtcccaactgatctccgaaggaggagcatgagcgggtcggcgaacgccgccctggtcgccgagggcctgcgcaagacctacccgaccgggacggcgctggacgggttcgacctcgtcgtgcccgagggcaccgtctgcgccctgctcggccccaacggcgcgggcaagacgaccgcggtgcgcatcctcagcaccctgctcaagccggacggcggccgggccgtggtggccggccacgacgtgtcccgcgagcccgccgaggtgcgccggaacatcggggtcaccggccagtacccggcggtcgaggagatcctgaccggccgcgagaacctggagatgtggggccgcctgtaccacgtgggccgcaaggaggcccggcgccgcgcggacgagctgctggagcagttcgacctgacggacgccgccgacaagcggctcaagcactactcgggcggtatgcggcgccggctcgacctggccgccgggttcttcaccgtccccaaggtcctcttcctggacgagcccaccaccggcctcgacccgcgcaaccgcaacgaggtctggaagatggtccgttcgatggtcgaccagggcacgaccgtgctcctcaccacgcagtacctggaggaggccgaccggctcgccgaccacatctcggtcatcgactcgggacgcggggtcgtcgagggcacgcccgagaccctgaagtccctcgtcggcggcgaccggatcgtggtgaccctggcccccggcgcggacctcgcggccgccgcggccgaggtcgcccgcctcacggacaccgagcccgaggtggacgccgacacccgccgcgtcgacgcggcggtacgggaccgggtcggggacctcgtggagatcgtggggacgctgcgcgaccgcggccacgaggtggcggacgtgtcgctgcgccgcccgacgctcgacgacgtgttcctgcacgtgaccaaccgtgccggtcgaaggaaggagccggtcggatgatggccgcgctgggaagggcccggtgggccgtcaccgatggctgggtggtcggccgcgccaacatgatcaactggcgccgcaaccccggactcatcttctactgcatgatgttcccgatcatgacggtggtcttcggctacgtcttcggcagcgccatgtcggtcgagggcggcggggactaccgcgccttcctgatgccgggcctgttcgggcaggcgatgatgttcggcgtcgtgaccagcatgctggccgtcaccagcgcggtctcccggggggtgaccgaccggttccgctcgatgccgatggcccagtcgggcgtcgccctgggccgcagcttcgccgacatgttcagctcgctgatcgagctgacgatcctcctcgtctgcggactgctggtcggctggcgctggcacgagggccccggcaaggcgctggccgcgctcggcctgctgctgctctggcgctactcgctcatctgggtcgggatctacctgggcctgctgctgcccccggacgccgcgggcgcggcgtacgtgccgctcctgcccctgacgatgctggcgaacaccttcgtatcgcccgagaagatgcccggctggctgggccacatcgcggagtggaacccgctgtcgtccacggtgtccgcctgccgtgagctgttcggcaacccgggcgtcggaggcgactcctgggtcaccgaccacgccgtggccctggccgtcgcctggcccgtactgctgctcgtgatcttcatgccgctgtcggtgcgccgctaccggacgctcagccgatgaccacgctcagccgatgaccacgagagaagggggaccggcgatgggcgccgagtcacgtgccgtccggctctaccggacgatgcgcctgatcagagaattcgaggaacgctgcctggcgatgtcgctcaccggcgagatcgtcggcggcatccacccctacatcggccaggaggcggtggccgccggcgtctgcgcggcgctcaccaaggacgacgtcgtcgccagcacccaccgcgggcacggccacgtcctcgccaagggggccgaccccaagcggatgctggccgagctgctcggcaccaccgacggcctcaaccggggccgcggcggctcgatgcacgccgccgacgtcggcctcggcgtctacggcgccaacggcatcgtcggcgcgggtgcgcccatcgccgccggcgcggcctggtccttccagcagcgcggcgaggaccgggtggcggtcgccttcttcggcgacggcgcgctcagccagggcgtggtgctggaggcgttcaacctcgcggccctgtggcggctcccggtggtgttcgtctgcgagaacaacggctacgcgaccagcctgccggtcggccgggcgctggccggcgacccggtggagcgggcggccgcgttcggcctggcggcgcgcgcggtggacgggatggacgccgaggccgtcgccgacgcggccgcccaggccgtcgagcgctgccgcgcgggcggcggcccggcctacctggagtgccggacgtaccggttccacggccaccactcctacgaggagcaggtggcgctcaactaccgggacgacgccgaggtcggcgactggcgggcccgcgacccgctgcgcacccagagcacccgggtggacgccgcgaccgtccgcacggtcgacgccgagatcaccgcgctcatcgacgaggccgtggagttcgcccgcgcgggccgggcccccgagccccacgaggcgctggaccacctgtatgccgacggcacgacgacacggcccggagtgatgatctgatgggtgcacttgcgtacatcaccgcgctgaaccaggcgctccacgacgagatggcgcgggacgaccgcgtctgcgtcttcggcgaagacgtgcggatcgggctgacccagaccaccaagggcctgcacgagcgcttcggcgacgggcgcgtcgtggacacgccgctgtcggagcaggcgttcaccagcctggccaccggcgcggcgatggcggggcagcgcccggtcgtggagtaccagatcccgtcgctgctgtacctggtcttcgagcagatcgccaaccaggcgcacaagttctcgctgatgaccggcgggcaggtggaggtccccgtcacctacctggtgccgggctccggttcgcgctccggcatggccggccagcactccgaccacccctacagcctgttcgcgcacgtcggcatcaagaccgtgctgcccgccaccgcctcggacgcctacggcctgctcctctccgcgctgcgcgaccccgacccggtggccgtcttcgcgccgagcgcgctgatgggcacggtcgaggaggtgaccggcgagctcggcccggtaccgctcggctccgcccggatccaccgcgcgggcgaggacgtgaccgtcgtcgccaccggccagtgcgtgcacaccgccctggccgtcgcggaggcgatggccggcgaggcgtcgatcgaggtcgtggacccgcgcaccatctacccggtggactgggagacgatccgggcgtcggccgggaagacgggccggctcgtcgtgatcgacgacgccaaccggatgagcggcttcgccggcgaggtcctggccaccgccgccgagcagttcgacctggtggccccgccccgccgggtgacccggccggacggcgcggtcatcccctacgcgctggtgctcgaccaggcgctgctgcccaacggggaccagctgaccgacgcgatccgcgccgtcctgaagtgaccggacgggaccgggccgtgacgagaacgggagagaagatggacgccgagcgccggccgaaggtcgtgacgatcaccgtcgggaccaacgagctgcgctggctggaccggtgcctcggttccctgctggacagcgacaccaccggcatcgacctggaggtctgctacgtcgacaacgactcggcggacggcagcgtcgagcacgtgcgggagaagtacccccgggcgacggtcatccgcaacgaccgcaacctgggcttcgccggggcgaacaacgtcggcatgcgccgcgcgctggagtccggcgcggactacgtgttcctcgtgaaccccgacacctggaccccgcccggcctggtgcgcggcctcaccgaagtggccgaggagtggccggagtacggcatcctcggcccgctccagtaccgctacgacgccgactccacggcgctcgacgagttcaacgactggacgcacacggtcctgtggctgggcgagcagcacgccttcgccggcgacgggatcgcccacccctccaccgccggccccgccgagggccgggccccgcgcacgctggagcacgcctacgtccagggttcggcgctgttcgcccggaccgcgatgctccgcgagaccgggctcttcgacgaggtgctgcacacctactacgaggagaccgacctgtgccgccgggcccgctgggcgggctggcgggtggcgctccacctggacctgggcatccagcaccggggcggcggaggcgccgccgtccccagcgagtacagccgggtccacatgcggcgcaaccgctactactacctcctgacggacatcgactggcatccggcgaaggccgcccggctggccgggcgctggctggtggcggacctcaggggccacagcgtcgtcggccgcgtgccggccgcgacgggggcgcgggagacggccgaggcgctgcgctggctcgccggccgggtgccgaccatgcggtcccggcgccggagccaccgcgcgctgcgggcccggggcgcgaagggggcttcccgatgaggccgttgaaggtcgcgctggtcaacatcccgctccgggtcccggggagcgacgagtggatcaccgtgccgccgcaggggtacggcgggatccagtgggtcgtcgccaacctgatggacgggctgctcgaactcggccacgaggtcttcctgctgggcgccccgggcagcccggcgggggccccgggactgaccgtcgtgccggtcggcgagccggaggagatccagcggtggctgcgggagtcggacgtcgacgtggtccacgaccacagcggcggcctgatcggcccggccgggctgcgtcccggcaccgcgttcatcagctcgcaccacttcaccacccgggcggtcaacccagcgggctgcacctacagttcccgggcgcagcgcgcgcactgcgggggcggcgacgacgcgcccgtcatcccgatccccgtcgacccggcccgctaccggtcggccgcggacgcggtgcccaaggaggacttcctgctcttcatgggccggatctcgccgcacaagggggcgctggaggccgccgcgttcgcggcggcgagcggccggcgcctggtgctggccgggccggcctgggagcccgactacttcgcggagatcacctcccggtacggctcgaccgtcgaggtgatcggggaggtgggcgccgaacggcggctcgacctgctcgcctccgcgcacgcggtgctcgccatgtcccaggcggtcgaggggccgtggggcggcatctggtgcgaaccgggcgccacggtggtctccgaggccgcggtgagcggcacccccgtcgtgggcacgcgcaacggctgcctggcggagatcgtgccgtcggtcggcgaggtcgtggcctacgggacggacttcacgcccgaggaggcccgccgggtgctggacgggctgccgtcgcccgacgaggtccggcgcgaggcggtccggctgtggggccacgtggagatcgccggacggtatgtggagcagtaccgcaggctgctctccggggtgacctggaagtgaggtgccggggtccggagcgggtgcgccgcccggaccccggcacgtcgtcagtgcgtgtccagccaggggcgcggctcggggtcggccacctcttcgaccgggcccatgaagacgagcacgtacgcccggcgggtctggccggtgccgttggggcccgcgtagtgcggggcccgcagggtgtgcaccacggcctcgcccgcggcgagcgggacggccaccccggcggcggggtccacggcgtcggtcaccagcccgcggatgcggtcgtcgtcgtcgatgtgccggtgcggcaggacggggcccaggtggccgccgggcaggtagtgcaggcagccgctctccaccgtggcctcgtccagcgtggtccacacgctgagcccgcgccggtgccagcgcgggtccatgtagccctcgtcctggtgccagggcgtctcggcgccgtagtgcggcggcttcaggatggcgtgcccgtagaagtcgagctcgtcctcgggaacgtccagcagccgcgcggcgatcgcccggcagcgcttgaagtgctcgctctcgaccagttcgggcgcgaatttctcggggcgcacgatctgcggcagccgggccggcccgtcggaatcctggcgggcggcgatgtcgaagtagtcgcccgtcgcgaagtcggcgtgctcggagaacagacggtcgtagaccccgcgcagccactccagctccgcgtcgtccacgagccgcggcagcgatgcgaatccgtcgtcccggaaggctgcgacgagctcctcgtcgatcacggtttccacggcccccatacggcggctcctttcgtcaggtattcgacgagtacgatacgttccttcccggaatagggcatcgcctttagccggagaatagtgaattgactagactctggccgccgaaggcgattccccggccttcggacgacgaccccggtgaaacgcgtgcaatactctcggcgcgacgtatgtgaaatacgggagcgggttgctatgactggacacagtgcgattgcgttggatgtcggaggcgtcatctactacgacgagcctttcgaactggcttggcttcaggggaccttcgacctcgcggtcaccgctgatccgagcgtcaccctccgacatttcatcgatgacaccgagcgtttctatctgggcgggaaagtccccgcgggccggcctgacattctcggttcggcggccgccgacgagagctgggtccggatcctgcgtgcctggggcgaactggcccaggagattcccggcgccattgcggcgacgaaggcgctcgcccgcgaaataccgacggccgtggtcgccaaccagccgcccgagtgcgccggcgtgctcgccgcgtgggggctgaccgccgtcctggagacggtcgtcctcgactgcttcgaaggcgtcgccaaacccgatccgcgactgctgggcatcgccctggaccggctgggcctgtcgcccgccgacctgctcgtggtgggcaaccgcgccgaccacgacgtggcgccggcccgcgccctgggctgcccggcggtgttcgtgctgccggaggacggctaccgcgtcccgccgggcgtccacccggacatcgtccgggcctaccgcgccctgcgcgcggtccgcaccgcgcccccggtggacgacgacgtgccgcgggtcgcctccctcgccgagctggccgcgtcgcccctggcgcgcctcggtgcgctgtgaccacggcacacccgctgcccggcggccgtacggcggtgatcggcgcgaccggcttcatcggatcccggctgacggccgccctcaccgccggggacccgcgcgtcccggccgccttcaaccgggcggtcccgccggtggccgacggccgcgcggcaccgggactggccgaggccgacatcgtctacttcctggccgccgggctgagcccgatcctggccgaacggcggcccgacctggtggaggccgaacgccgcctcctgatcgaggtgttggacgcgctggccgcggcgggccgccgtccggtgttcgtgctggccggctcgggcggcgcggtctacgcgcccgaggtcgcgccgccgtaccgggagaccaccccgacccgccccgactccgcctacgggcacgccaaactccgcctggaacacgagctgttccggcgccgggacgcggtccgcgccgtggtggcgcggctgagtaacgtctacggccccggccagcggcccgtccgcgggttcggcgtgctgccgcactggctgcgggcggccgtccggggcgagcccgtgcgggtgttcggcgatccgcacgtggtccgggactacgtccacgtcgacgacgtcacccggttcctgctcgcgctgcgcacccggatcgccggcggccggctgccctccgtggtcaacatcggctccggcgtgccgacttcgctgagcggcctgctggacatcgtgtccgaggtgaccggcggctccgtcgcggtgcgctgggagcggggccgctccttcgaccggcagggcaactggctggacgtcgcgcgggccgacgccgagttcggctggcgggccgcgatcccgctggccgagggcgtccgcgcgtgctgggagcgggtgctcgacgacgccggccgggccgcttccgtctcgacgtccgtctcgacgctctagcggttccgctccggcgctccggcggcggatccgcgtgcgccccgggcccggggcggggaaacgggcggcctgcgcggccgttcacgttctccgccccgggcccggggcgcacgggtgtggcggccgggccccgggctcgtgcgacacgagtcccgcggcccggagccgtcgcggggtcaggccctggaccggccgatccccagggtcggggtggtccgcaggtacaggcccgtggcggggtcgtagaggtcgtgggcgtccatcttgccgggggcctcgctgaccggcgcgctcggcgtgccggcctccgccatcaggcgggcgttctcggccgcggcgagcagctggcggacggagttgtcctccggcagggcgacggcctgagtgtgcgcctggtgggcgtggtcctcgtgcgtcccggtgacggcgtcgtggatgtcggcgagccccgcgaccagctcggcgaaggccaccgcgccgtccacctgctcgtactcctccgtggcgcgctccgggaccatcgcgtcggccaggccgaagtaggcggccttgccggcctgctgctggtacacaccggacaccagggtgaacagccgctggtaggcgttgcggtagagcgactcgtagaaggcgccggcctccttctccgtgacgtcctcgttcaccgtggcgagcacggacgtcgcggccagcatgccgctgtagagcgccaggtggacgccggtggacagcagcgggtcgaggaagcaggcggcgtcgccggcgaggtagtagccggggccgtggaagctgtcggcgacgtaggagaagtcctgctccacccggacgcccggctggtactcgccctccgccatgaggtcgcggacggtcgggttctcctggaccagcgaggcgagcatcgcctccaggtcgtcgtgctccttgcggcgctccaggaagcggtcctggtggcagacgaagccgacgctgtaccggtcgccgcgcagcgggatcacccagtaccagccgtcgggggcgccgatgacgttgatgccgccggtgggcgaggtgggcagcagggaaccgccctgccagtagccccagatcgcgacgttgcggaagatctcgtgcggctggcggttcttcaggtgccgggagatgacgcccgtacggccggaggcgtcgatgacgtagtcgaactcctcgctgaccagctcaccggagtccgggtccgtccactcggccccgaccgcgcggtcgccgtcgaacagcacgcgcttgaccgtgacgccctcggtgacgtcggcgccctgcttgaccgcgttcttcaggagcacgtggtcgaagtcgtcgcggtcgacctgccaggaccgcacgtccgggccgaagatcttcggccagtcgatggcccagtcctccttgccccagcgcagcagcacaccgttcttgaccgtgtaaccgcgggagtcgacctcgtccagcgcgccgacgagatcgacgatggtgcggcaggaagaggcgatcgactcgccgatgtggtaccgcgggaaagtctcccgctccagcagcttgacggacattccggccttgctgagcaaggaggccgcagtggaccctgccggcccaccaccgattacgagcactgttttgggcatcgagctccccctgacaattcgggtttcacatggcggcgcgttacggaaaggtggtcaacgccaggcacggtcaattgcgaaatacttctccgagtgtagtgaccacgctctagtggaatctctagttcttcttcgggcccggctatgtagcatccgcttcgggattagtgccgggctcggcggccgtcctgtaaaggagcgtgatgggaacccgcgtactgaccgaggagcaggtcgagggcttcgtctccgacggcttcgtccacctgccgggtgcgttcccgggggagctcgccgaggaggcgcgcgccctgctgtggcggcagctggacatggacccggacgacccgggcacctggacgcgggaggtggtccggctcggggtgcgcgacgacgacgtgttcgtccgtgccgccaacaccccgctgctgcacgccgcctacgaccagctcgccggggagggccgctggcagccgctgacccaggtcggcacgttcccggtgcggttccccgtgacgaagcggccggaggagaccgaggactacggctggcacatcgacgccagcttcctcgccgagggcgccgacgccgaccgcgactggtccggcgagctcgacgtgatcccgccggactacgacaagatcttccggtacaacgtgtggtcccgcggccgggcgctgctgctcctgctgctgttctccgacaccggcgaggaggacgcgcccacgctgatccgcgtcggctcccacctggacgtaccgccgctgctggcaccgtacggcgccgagggcacctacctggaggccggggaggtgggacgggaccggccgctgaggtccgcgacgggcaaggccggggacgcctacctctgccaccccttcctggtgcacacgccggtcgccaacaccggcgtccgcccgcgcttcatggcccagccgaacctgctgcccgtggggcagctcgaactcgaccggcccgacggccggtacacccccgtcgagcgggccgtgcgccggggcctcggcgaggacgccccccgacgagagagccggtgagatggaagagcagcacaacgcgccggccccctgggcggacgtgatccggctggtgttcggcggcatggccacccaggtcgtcggcctggcggtacggctccggctgcccgacgcgatcggcgccggcgagcggaccgccgacggcctggccgcccgcttcgacggcgaacccgccgccatgaaccggctgctgcgcggcctcgccgcgctcggggtgctccgcgagcccgagccgggcgtgttcgacctgacgccggtcggcgagctgctgcgcgccgaccgctcgccgtccttccacgcgctgtcccgcatgctcaccgacccggcggtctccacggcctggcagcacctggaccacagcgtccgcaccggcggcccggccttcgaccaggtcttcggccgcgacttcttcgcccacctcgcggacgaccccgacctgtcggggctctacaacgccgccatgagccagggcacccgcggcatcgccgacctggtcgcgctgcgccaggacttctccggcgtccgcaccgtcgtggacgtcgggggcggtgacgggacgctgctcgccgcggtgctgcgcgcgcacccggcgctgcgcggcgtgctgtacgacacggcgaccggggccgcccgggccggcgaggagctggcggcggcgggcgtcgcggaccgcgccacggtggagaccggcgacttcttcgccgccgtgcccccgggcggcgacctctacctgctcaagagcgtcgtccacggctgggaggacgagcgggccgcggcgatcctcgcgcactgccgccgggcgctgcccgcgcacggccgggtcgtcatggtcgagcacgtgctgcccgacaccgtccccgccgacgcggtgcccacgacgtacctcaacgacctcaacctgctggtcaacggcaacgggctggagcgcacccgcggcgacttccggcggctctgcgcggcggcgggcctgacggccggcgcgttcaccccgctggacggcaccgacctgtggctgatcgaggccgtccccgccgccccggcggactgaaccgggaattccacctcggcgccttttcgcgggccgatacggaatgccaggaccggcccgcgaatacgctagtgaattcactacactgccggtgcggaccgtgaattacctgtgcacttcccgtaccgtttccggtgaccggtgatacgcattgccccgcggcgcatggaatccaaaaaaccatgcggatgccgttctgtgggttcctcacggctgggagatgattctgtctaggcgagcgctcattacgggaatcacaggccaggatggcacttatctcgcgcgtcagctcctcgagtccggatacgaggtgttcggaatggtgcgcgggcaggggcggccgtacgcgcgcgacggcagtcccctgcacccggacatccgggtggtgagcggcgacctgctggaccagacgagcctgatagccgcggtcgagcaggcgagccccaccgaggtctacaacctcggcgccctgtcgtacgtcccggtctcctggaagcagcccgccgtcgccgcggaggtgaccgggaagggcgtgctgcggatgctggaggccatccgcagcgtggcggggctcaacgcgtcccggaccaccggcagcggcgtcccgcgcttctaccaggcgtccacctccgagatgttcggaaaggtgcgcgagaccccgcagagcgagtccacgcccttccacccccgcagcccctacggcgtggccaaggcgttcgggcactacatggtgcagaactaccgcgagtcctacgggatgttcgcggtcagcggcatcctgttcaaccacgagtcccccatccgcggccccgagttcgtcacccggaaggtctcgctcggggtggccgccgtgaagctcggcctggtggacaagctccggctgggcaacctcgacgccgagcgcgactggggcttcgccggggactacgtgcgcggcatgcggatgatgctcgcccaggacgagccggaggacatcgtcctgggcaccggcgtcacccacagcgtccgcgacctggtggagttcgccttcgcgcacgccggcctcgactggcgcgaccacgtggaggtcgacccccggctgctccgcccggcggaggtggaactcctctgcgccgacctcagccgcgcccgggagaagctcggctggaagcccgaggtgtcgttcgaggaactgatcgccatgatggtcgacaacgacctgcgcctgctcaccgagagcgagaacgccgccggtgaagccgtcctcgaacaggccggtctgtggtaagcctcccggccggaccggccggcgggctcgtacggtccctcccgccggagtcgtacctcgcggacttcgccggcgccgagttcatcgactggttcgcccggtgctccgccgccgcgcggtgccgggtgacccggacgccgctgaccgagctgcggcgctggcggttcgacgccgacacggggaacctcgggcacgactccggggccttcttcgtcgtcgagggcctccaggtgcggaccgggtacggaccggtccgcgagtggagccagcccatcatcaaccagcccgagatcggcatcctcggcatgctggtcaaggaggtcgacggcgtcccgtactgcctcgtgcaggccaagatcgagcccggcaaccacaacggcatccaggtgtcgccgaccgtccaggccacgcgcagcaactacacccgcatccaccagggccggagcacccgctacctcgagtacttcacggaccccggcgcgggccgcaccctggtcgacgtcctgcagtccgagcagggctcctggttcctgcgcaagcgcaaccgcaacatggtcgtgcaggtcaccgaggacgtcccggccggcgaggaccaccactggctgccgctgcccgaactgcggcggctgctgcggatcgacggcctggtcaacatggacacccggaccgtactggcctgcctcccggcggacacgttccccgcgtcccagccggtgccggccggggacgccgcgtcggcgctcgtcctctcgacgacgggccggggccgcgccctgaacgacacggcgaccgtgctgcgctggttcaccggcgccaagagccggcacgaactgtcggcgcaccggatccccctgcgcgacctgcccgggtggcgcagcaccccggagcagatcacccacgaggacgggcggcacttcagcatcatcggggtgaccgccgaggtcggcaaccgcgaggtggccgcatgggaccagcccctgctgtacccggaagggcgcggcgtcgtcgcgttcgtcatcaaggtgatcgaaggggtcgcgcacctgctggtccacgcccggttccagcccggcctgctggacgggatggagatggggccgaccgtgcagtgcgtcccggagaactacccggacgggccgccgcggttcctcgactacgtcctgaacgccccccgggagcgcgtcctctacaacgccgtcctggccgaggaggggggccgcttctaccactcgcagaacaactacctcctcgtcgaagccggcgacgacttccccacggccgtccccgaggactactgctggatgaccgcgcaccagctcaccctgctcctccggcacggctactacgtcaacgtcgaggcgcgcagcctgctggcctgcctgcagagttggtgaacccatgaagaacgagcgtcccgtgcggctgggtgttctcggctgctccgacatcgcccggcgccgcaccctcccggccgtacagaaggtcccggaggtgacggtggccgccgtcgcctcccggtccgaggacaacgcccgcgcggtcgcggcgcggttcggcggcgaggccgtcgccggctacgaggcgctgctggagcgaccggacgtcgaagcggtctacatctcgctgcccaccgggctgcaccaccactggaccgagcgggcgctgcgggcgggaaagcacgtgctcgcggagaagccgctgaccgcccggtacccggacaccgcggcggcggtccgcctcgcgcactccctcggcctgacgctgatggagaacctcaccttcccccagcactcgatgcacgaagccgtgcgcgggatggtggagaagggcgacatcggcgaactgcgctcgatgaccagcgagttcggcttcccgccactggcccccggcaacgtccggtaccgggcggacctggccggcggcagcctgctggacgcgggggtgtatccgctcgccgcggcgagcatgttcctcgggccggaactcgacgtggtcggggcgacgctgcggaagggccccggagcggacgtggacgtggccggcgacgcgctgctgagcgcgccggacggccgcacggcgcacgtctccttcggcttcgagcacgcctaccgctgcgcgtacaccctgtgggggagcgagggccggatcatcgtcgaccgcgccttcaccccgccgcccgacttctgccccagggtccggctggaacgcgccgacgaggtacgggagcgcgtcctgccggccgacgaccagttcgccggcaccctggcgcgcttcgtccgggccatcgccggcggcggggcggcggcgcacggcgccgaggtcgtcgcgcgggcccgattggtaagtcaggtgcaggaccgggcacggctgctcggcaacggctggtcaggaggagcagatggccgatgagcgcgagcgggttctcgtggccgggggaacggggttcgtgggccgccggctctgcgcggacctcgtcgccgccggggccgaggtggccgcggtcgcccggcgggccccggacctccccccgccgtgccgcatcctcaccctggacgtcaccacggcctcgcccggcgaactggccggcctgatcgactcgttccgcccgcacacgctggtcaacgccatcggcagcaactgggggatcgccgaacgggacctggaggccaactgcgccgtgcccgcgcggcgcctgatggccgccctgcggcggaccacctgccggccctacgtcgtccacctcggctcggtgctggagtacggcccgaccgcgcccggcgagacgacccggaccgcgacgccggcccggccgacgaccacctacggcaaggccaagctcgcggcgagccgcgccgtgctggaggccgccgcggagggcgtcgtcgaggcgggcgtgctgcggatcggcaatgtcgcgggcccgggcaccccggcggtcagcctgctgggccgggtggccgggcggctcgccgaggccgtcgcccgggacaccctcccggcggtcgtggagctgtcccagctgcgcgcccaccgggactacgtcgacgtgcgcgacgtgtcggaagcggtgctggccgccacccgcgcccggataccggggctcgtcgtcccgatcggacgcggcgaggccgtggcggtgcgctggctggtggacctcctcgtggaggtcagcggcgtgcccgccgaggtgcgggaactccccgccgccaccacgggaaccgccggcgacgactgggtccaggtcgaccccgagcccgcccgccggctcctcggctggaccgccgtccgctcgctgcgcgagtcggtgagcggactgtgggacgagacgctgcgggcccacgggatccacgaccccgcgggggcgcggcggtga

SEQ ID NO: 278 - DNA, 15240 bp, Micromonospora carbonacea africana
atgacgacccccctgccccgtccgatcgacgccgtcctgttcgacttctccggcacgctgttcgccgtggaactgccgcagcgttggctgcgggcggcggcggccaccgtcggcgtccagctcgacccggcgcagcaggaggccctgaccgggttgctgctggcggccggccgtcccggcgggccggagccgcacgccgtcccgccggggctcgccgaggtgtacgcccgccgggacctctcgcccgaaacgcaccgcagcgcgtacgtgggcctgctctccaccgtcgacctgccccatcccggcctcgccgaggcgctctacgaccggctgttccgcacggacggctggctgccctaccgcgacgccgccccggtcctggcggagttgcgccggcgcggcgtgggcaccgccgtggtcagcaacatcgcctgggacctgcggcccaccttcgcggcgtacgggatggcggagctggtggacgcctacgtcttctcccacgaggtgggggcggtcaagcccgatccccggatcttccgcaccgcctgcgacgagctgaaggtcgccccggagcgggcgctgatggtgggcgacaccctggccgacggtggggcggtgtacgccggcctgcagaccctgctgctgccggccagcccgccggacaccgtgcacggcctggccgccgtgctcgaactggtcggcggcgggccggccaggcccccgtttgcggaaatggcggacgcatagagatccaccgatcacacctcggtggcccataagtagggaaatcacgagtgatccttcggtacgttcacgaagagcccagtccaccgtgacccctggagtgctcgtgaaccagcgacccgtctcggtcccatcctttcgagggcgttcgtgaaggcgctggtcctggcgggaggggtgggatcgagattgcgtccgatcacccacacgtccgccaaacaactcattcccgtggccaacaagccggtgctgttctacgggctcgaggctattcgtgagggcggtatcgaggaggtgggcatcgtcgtcggcagcaccgcgcccgaaattcagcgcgtggtcggcgatggttcccagttcggcctccaggtgacctaccttccgcaggaggctccccgggggctggcgcacgccgtgctcatctcccgcgactacctcggcgacgacgacttcgtcatgtacctcggcgacaacttcatcgtcggcgggatcaaggacatcgtcgagcgcttccggcaggagcgaccgcacgcgcagatcatgctgacccgggtcgccgacccgcacgccttcggcgtcgccgagatgggcgcggacggccgggtgatcggggtggaggagaagcccgagcaccccaagagcgacctggccctggtcggggtctacgtcttcagcccggtggtccacgatgccgtggccgagctgaagccgtcctggcgcaacgagctggagatcaccgacgcggtgcagtggatgatcgaccgcggccaccgggtcgactccaccatgatcacgggctactggaaggacaccggcaacctcgccgacatgctggagatgaaccggttcgtcctcggcagcgtcgagcctttggtcgagggcaaggtcgacgaccgcaccgaactgatcggcccggtggtgatcagcgccggcgccgacgtcagcggctcccggatcgtcggcccggtggtggtcggagccggctcgatcatccgcaactcctacctcggcccgtacacctcgatcgactgcgactgcaccctgctggagaccgagatcgagcactccatcgtgctgcgcggtgcctacatcgagggcatcggccgcatcgagttctcgatgatcggccgggaggcgcgggtggtccccgggccccgggtgcccaagacgcaccggttcgtcctcggcgatcacagcgaagtccgggtgggggtctgatgcgtcgcgtcctggtcaccggcggtgccggtttcatcggctcgcagtacgtccgcgacctggccaccggtgcctaccccgacacggcgcaggcccgggtgacggtgctggacaagctgacgtacgcgggcaacctcgccaacctcgaaccggtccaggaccggatcaccttcgtccagggcgacgtctgcgacacggcgctgctggccgaggtgctgcccgggcacgacgtggtggtcaacttcgccgccgagtcgcacgtcgaccggtccatcgccgactcggcggagttcgtccgcaccaacgtgcagggcgtccagacgctcatgcaggcgtgtctcgacgccggggtcgcccgggtggtccaggtctccaccgacgaggtctacggcagcatcgacgagggttcctgggccgaggacacccccctggcgccgaactccccgtacgcggcggcgaaggccggcggggacctgatcgccctggcctacgcccgcacccacgggctgccggtctgcctcacccggtgcggcaacaactacgggccgtaccagtttccggagaagctgatcccgctgttcgtcaccgagctgttgaacgggcgacgggtgccgctgtacggcgacggcgggaacgtccgcgactggatccacgtgacggaccactgccggggcatccagaccgtcgtcgaccgcggtgtccccggcgaggtctaccacatcgccggcacggctgagctgtccaacatggagctgaccgggcggctgctggacgccttgggggccgggtgggaccgggtcgagcgggtgccggaccgcaagggccacgaccgccgctactcgctgacggacgcgaaactgcgggcgctcggctaccggcccgaggtcgccttcgccgacggcctggccgagacgatcgactggtaccggacgcaccgggactggtgggagccgctgaagaagcaggccgaccggtcgccggtgccctgaggcgagcgccgcccacggggggcggcgctcgccgacgaagggcgcgccgcagatcgcccgctcggtcaaccctttccggatctattgacgaaggagccccggatggttcgttgtctggtgactggtggtgccggattcatcggctcgcacctggtggagtcattggtcaggaatgggcaccgggtcaccgttctggacgacctcagcggcggcagccggcagcgggttccggccggggtggacctggccgtcggttcggtgaccgacgtggacttcgtcgattcactgttcgccgagaaccgattcgagcgggtcttccactttgccgccttcgcggcggaggcgatcagccattcggtgaagcagctcaactacggcaccaatgtgatgggcagcataaatctgatcaacgcgtcgctgcgtaccggcgtgcggttcttctgcttcgcctcctccgtggcggtctacggccacggcgagacgccgatgcgcgagtccgtcgtccccgtccccgcggacagctacggcctggccaagtacctggtcgagcgcgagctggaggtgacgatgcggacccaggggctgcccttcaccgccttccgcatgcacaacgtctacggcgagtggcagaacatgcgggacccgtaccgcaacgcggtcgccatcttcttcaaccagatcctgcgaggcgagccgatcaccgtgtacggcgacggcggccaggtccgcgcgttcacgtacgtcggtgacgtggtgaacgtggtcagccgcgccgccgagaccgaggccgcgtgggggcgggcattcaacgtgggctcgtcgagcaccaacaccgtgctggagctggcccaggcggtacggtcggcggccggcgtgccggagcatccgatcgcccacctgccgtcgcgggacgaggtgcgaaccgcgtacaccgcgacggagctggcccgatcggtcttcggcgactggacggacaccccgctggccgagggactggcccgcaccgccaggtgggcggccgacgccgggccggcggaactccagtcgtccttcgatatcgagatcggcggggaccggattccggaatgggcccggctggtcaacgaaaggctcagcacggcgagccgctgaatatgatgaaaacactagtccgcaaccgcaatggcatcgctaggctttgatcccatggaccgtgaagagattcgtcgccgcgtcgccgcgctcgagccgtgggtgaatggattcgagcacgacggagtgcgttacgccgagggctcccagcacggttatctgctgagccagtccccggccgaccgggccgcgaagttcttcggtgcgtttcccgacgcgcggcggatcctcgaactcggcgcactggagggcgcggacacgcttgccctcgcccggcaccccggcacgacggtgcttgccctggagggccgtccggagaacctgcgccgcgcggagctggtgatggaggtcaacggcatcaccaacgtggagctgcgcgtcgccgacgtggagcggatcgacttcaccgagctgggcgagttcgacgccgtcctctgcgcgggcctgctctaccacgtgcgtgagccgtggaccctgctgaaggacatcgcgggcgtcgcggcgggaatctacctctccacccactactggggaggcgtgggcgacctgcaaccgatcgacggctacacggtcaagcaggtccgcgaggagcaccccgagccgcaggcccgggggctcagcgtcgacgtgcgctggctcgaccgggagtccctgttcgccgccctgcacaacgccggcttcgccgaggtggaggtgctgcacgagcgccggtcgccggaggtgtgcgacatcatcgccgtcggccgccgcaccggcacgcgccgaccgaccgaaggggtgagcctccgatgaccaccatgtcgcgggagcgcgaggccgtggccagccggttccgcagcgacgggatcgcgcacgtcgggccggtgctcgaccccgaggtgctggcccagctcaaggccggcgcggtaagcctgatcgaccggttcgccggtccggcgcgggccaacgccgactactggaactacgaggtcgagggcgcggagccggtgctgtaccggatccacaacctcgaaaagcaggactggccgcagggcgagttgctgcaccggccggagatcgccgcggtggccgccgacgtcctcggcaccccggtcgtgcccaccgccttcgcgttggtgctcaaggagccactgcgggcggccggcgtgccgtggcaccgggaccgggtcaacgtccccccgcacgcggtctgcaacatcagcatctgcctggacaccgccgggccggagaacggctgtctggagggcgtgcccggctcccacctgctgcccgacgacgccgacgtcacggccgtgcgcgacgccgggccgcgggtgccggtcccctcgcaggagggggacttcatcgtccacgacgtacggctggtgcacggctccgggccgaacccctccgaccagtggcggcgcaccatcgtgatcgagttcgccgatcccgcgcgggagttgccggtcctgacctcctgaccgtccggccgcgacccccaacctcccctcggcaggccacagagaggctgcgatgaaggttctgttcaccgtgtccaactgggccgggcactacatgtgcatggtgccgctggcctgggcgctgcgggcggccggccacgacgtcaaggtcgcctgttcgccgtcccaggtccggggcgtggccgcggcgggcatgatgcccgtctcggtgctcgacggacccgacatgatggagagcgcccggctgggcttctacgtccaggccctctacaccccgcagcacatggtggagcaaccgctgccgttgaaccccttcacgggccggccgatggactcgctcgccgacttcgacaccgacctgctcgccgactactggaagcgcacggtcaccgcggtccagcgcagctacgacaacgcggtcgactacgccgcccactaccggcccgacctggtggtccacgacatcatggccgtggagggcgcgctggtcgccgagctgcaccacatccccagcgtctacttctcgcccgggttcatcggcaccatcgagaccgagcccgggctcgacctggtctccggcgacccggtgaccgagttccgcaagtacggcgtcgagtggagccggcaccagatccggtacgccatcgacccgtcgcccgacgtggcgatcccgccgatgggcgacgcgctgcggatcccgatccgctaccagccctacaacggctcccaggacgtggacccctggctgctcggtccgcgccggggcaagcgggtctgcgtggtgtggggcaactccgccacgggcgtgttcggcgcgcaggtgccggcgctgcggcacgccgtcgacgccgccgcccagcggggcgtggaggtcgtgatcaccgccgcctcctccgaggtggaggggctgggcgcgctgccgccgaacgtgcgggtgctcagcaactgcccgctggagctcatcctccccgactgcgacttgctggtgcaccacggcagcgccaactgctacatgaacgggctcgccatgggcgtgccgcagttgtcgctggcgctcaactacgacgccctgatctacgggcggcggctcgacccgcagggcgcgacgaagacgctgcccggcctgaaggcgtcccgcgaggaggtcgacgaggccctcggctccgtcctctacgaccaccgattccgggtggcggcgcagcggatgcgggagtccgtcaccaccgggccgaccgccgtccaggtggccgaactcctggcccggctggccgacaccggcgcgctgagccccgaggacgtcgccgagttcgcccggcgtccgtgacaccgcccgcccagttttccgcagccgcccgcccagttgtccccgcagagcccgacaagaccgcgagtgaggtccgatgaacgacgcgaagcaggcgacgccgccgccgcaggacgccccccggggctgtccgctccggagcaccggcgacctcaactacgtctgggagtggaacacgccggaggagatgcagatgcagctcgccggctaccagccgcgcgaggagtacctccaggaccgtgtcgacaaggtcgccctggtcgtcgagcagctcgggctcggcccggaatcggagatcttcgagatcggcagcggcgagggcatcatggcggccgggctcgccgaccgggtgcgcgccgtgctctgcgccgacgtcagccgatccttcctcgacaaggcgcgcgccacctgcgagggccgggagaacgtctcctaccaccacatcgagaacgacttcctggagaagctgccgaccgccgcgttcgacgccgggttctccctgaacgtgttcatccacctcaacgtcttcgaggtcttcctctacttccgtcagatccggcggatcctgcggcccggcgggctgttctgcttcaacttcctggacctcggcgacaacacgcgcggcttcttccacacctacgccgagcggtaccgcgacgcgaaccccgtggagttcaaggggttcctgaactggcacggcgtggagttgatgaccggcatcgccgccgaggccgggctgacgccggtcaccgacaagatgatcaatcacgacggcgtggtgttcctgacgctgcgcagcgacggggagccggcggcgtgacggccggccgacgggcgtgggtggggcaccgggcgggaggacgccgtgcggcagcgctgcatcggtgagcgggggccgctggtctcggcgctcggcctgggcacctgggcgctcggcggccagtggggccggcggatcgaaccaggcgtgcaggccgtccgccgggccttcgacctgggcgtcacccttttcgacacctcccgggcgtacggcggcggggccgccgaggcggcccttgcccgcgggctggccgacctgttgcccgcgcaccgggacgagatcgtgatcgccacggccggcgggctggagacccggcccggcgtgcgacggcacaagctcgacccgcccggacggacggtgcgtaacagcgaccccgcgttcctccgggacgagctgctggccagcctgcgtcagctcggcacggaccacgtcgacgtgtactccgtgcactggcccgacccgaccgtcccgctcgcggagaccgccgaggtgctggcggggttcgtgcgcgagggcctggcccgccatgtcggcttcgccaacgtgacggcgggcgacctggccgagctggtgccgaccgggctgctggacgtcgtccaggtgccgttcaacctgctcgaccgtggtgccgagaaggaggtgctgccccgctgccaggaggccggcgtcggggtgctgggcggctccgcgctcgcccacgggctgctcaccggcgcgctgcaccgcgaccaggcattcgcccccgaggactggcgggcctactcgcacgccttccggggtgaggactacgcccaactgctcgacgtggtcgacggcctcgccgccttcgccgccgagcgtgggcacaccgtcgcgcaggtggcactggcctgggcgctgcaccacccggccggggtggtgccggtgttcggcgctcagtcgcccggagtcgtcgaggagaacgtccgcgccgccggcctggagctgtccgagatcgagctgcgggagctggaactcctggtccgtaccgccccggcggtcggctccggggccggaccggcgtgccggaccgaggagcgtgacgatgtccactgagctttccgcgaccgacgaggccggcgcgctgtcgatgaacgactggtacgaccagctcaccgtggcgctgatcgagcagatctgcgaaccggacgccaacaccgtggacatcggggccggcgccggcgacatcctgcgtcacctgctgcgggtcgccccccgtggccggcacgtggccgtcgaggcgctgccgtcgtacgccgaggggctgcgccgggacttccccggcgtgacggtggtggccgccgccgccgccgagcgcaccggccgggacagcttcgtccacgtggtctccaaccccggctacagcgggctgcgccggcgtccctacgaccgcccggacgagaccctgcgggagctgacggtcgacaccgtccgcctggacgacgtgctccccggtgaccgccggatcgacctggtcaaggtggacaccgagggcggcgaggtgctcgccctgcgcggtgccgtggagctgctccgccgctggcggccggtgatcgtcttcgagcacggcggcgaccacgccatgcgggagtacggcaccaccagcgccgacctgtgggcgctgctcgtgaccgagctgggttacgagctgcgtaccctgcccgggcgccgcgccgggcagccggcgctggaccgggcggggttcgccgacgcgctgcgggagcactggtacttcgtcgccgaccgaccgagcccgggcccggccggcggctccgggcagcacgaaccgtccgcctggcagaagggaaccgaaccatgagcgcgactgtggacgtccgcaccgagcaggccgtccccgagtgccacatccacgagaccgggctgcttccggagcacctgaccgccttccgccggcagggcgcgctgatcctgcgcgggctgctggaccccgacgagctgcggtccgtgcaggcggcggccgacgagctgatcgacgaagcctggcgcacccggacgatgaccgacaccatctggacgctggaaccgcacgagccggacgcggcgccggtgcggatcgagtacgtggtcgacaagtccccggtggtcgcccggctcgccggccaccccctgctgctgcgggcgatggaggacctggtcggccccaacctcatccccacctgggacagcatggtcttcaagaccgaggcgggggcgccccggctgccctggcaccgcgacggcggcctctacccggagaacgcggtcggcatcaccggcgcgggccgggtgatcgacgtcggcatctaccttgacccggccccggaggacaactgcgtctggtgcatcccgcagtcgaactactgggacaccgaccgggcgaacgagaccaccacccggatgaacgccaccgagtgggacaccaccggggcggtgccggcggtgatgaacccgggcgacgtgatgctgcacaacatcctgatgctgcacgccgcgccggcggtgaccggcaagcggcgccgggtcatctacttcgagtaccggcccgccgaggtcgagctggacctcggcccgcacgtgccggagtacatcgggctcaagcagcaggtgctgctctcctgcctggcgcagcggcgggcggcaccggagcacgccggcgagcagcccttcgagtaccggcccgccgcgtcgctgcggcgctgggagggcctgccggagccgaccaccatgcggtacccgcacgaggagtactggcgttggtgaccctgctgcggcgcgtacccgggcttggtcccctgctgaccggtgccggcaccgcccccaccggcccgtcgctggacgaggtgatggccgaacggttccgggagcggatcgagccccggcccggggactgggcatacgcccacttcctggacctgcgcgacgcgctggcggaggcggtccgggacgccacgggagtctggctcgactacggcgcgggcacctcgccataccggggcctgttccgctccgccgagttgcagaccgccgacatcccgggcggtgagtccctgccggccgaccacgccctcgaccgggacgggcgctgcccggtgccggacgggacgttcgacggggtgctctccacccaggtgctcgaacacgtctcggacgcggacgcgtacctgcgggaggcgtaccggctgctgcgcccgggcggccggctggtgctctccacccacggggtgtgggaggagcacggcggccaggacctgtggcggtggaccgccgacgggctggcccgccaggccgagtgggccggcttcaccgtcgaccgcaccgtcaagctgacctgcgggccgcgcggcctgttgctgctgctgcgctggtacggccgcgagcacggctggccgtccggcggcccggtgggtctggccctgcgcgccctgtggctggtggaccggctgcggccccgcgcgctcgacgagtacctcgaccgggcgttccggcatctcggccgcagcgagggccccgaccagcccttctatctggacatcctgctggtcgccagcaaaccgcacgacggggcgcctggtcccgcacaccggcacgagacgaggaggacctgacgtgagccagttggcggcggccggcgaggagttggcgtcggaggtggtcgagcggaccacctgccgggtgtgtggcgggaccctgcgtacggtcctcgacctcggtgcccagtacctacagggcagcttcgtgaagcccggcgtgtcggacccgcccagggtgcgcttccccctggagctgacccggtgcgcggaacgcgacggcggtgacccgtgcggcctggtgcagttgcggcacaccctgccgggtgggctgctctacgacacctactggtaccgctcgcggatcaacgacacgatgcgccggcatctcgccgacgtcgtggacgcggcggtcgaggtgttgggggagcggcccggcaaggtgctcgacatcggctgcaacgacggcaccctgctgggcaacctgaccgacgcgcagcggtggggcatcgacccctccagcgccgccgacgacgcgcccgacgacttcaatctgatccgcgacttcttccccagccccgagctggtcccgcacgcgggcagcttcgacctggtcacctcgatcgcgatgttctacgacgtcgaggacccggtggagttcgcccgtcaggtcgaggcgctgctcgccccgggcggggtctgggtggtcgaggtcgcctacctgccggcgatgctggagatcgccggctacgacagcatctgccacgagcacctgtcctactactcgctggccacgctgagccgcattctgggcgcggcgggcctggagatcgtccgtgccagcctcaacggggtgaacggcggctcgatctgctgcgtggtcacccgggccggtgaggtgggcggccgggccgacggttcggtcaaggcactcgccgaccgggagctggcgctggggctggacggcgacgccccgtaccagcgcttcgccgagcaggtgcgccagcaccgtgacgaggtgagcgccctgctgcgcgagctgcggggccagggccgcacggtgcacgtctacggcgcgtcgacgaagggcaacaccctcctgcagttctgcggcatagaccgcgagctcatccggtacgccgcggagcgcaatccggacaaggtgggcgcgcgcaccctcggcacggacatcgaaatcatcagcgagcaggagtcgcgggcggcccgcccggactactacctggtcctgccctggcacttccgggacgagatcgtcgcccgggaggcggagatgctggccagcggcacccggttgatctttccgctgccccgggtcgagacggtcggccgaccgggatgacaccgcccccaccaccgaggtgatcaactttcatgactgacccggaagcccggtcccggaccatgtgcgtgctgccctggatccatctctgcgcgtccatcgacggtgtctacgggcggtgctgcgtggacgactcgatgtaccacaacaagctgtacgagcaggaggaggagccggagttcctgctcaacgacgacgccgtcggctgctcgccgcggtcccgctacgcggcggacaaccccggccgggtgatgggcctggcggacgccttcaacagccccaacatgcgccggacccggctggcgatgctggccggggagcgggtcgacgcctgctcctactgctaccaccgcgaggaccacggcgcgctgtcgtaccggcaggagatcaaccagcggttccgggacatcgccgaccccgaccggctggccgcccgcaccgcgcccgacggcaccgtcgaggacttcccgttcttcctcgacatccggttcggcaacacctgcaacctgcggtgcgtgatgtgcgcgtacccggtcagctcgggctggggcgccaagaagcggccggcctggtcgtccgcggtcatcgacgcctaccgggacgacgacgagctgtggcagaccctgcgcgagaacgcccacctcatccggcggctgtacttcgccggtggggagccgttcatgcagccgggccacttcgccctgctcgacctgctggtggagacgggtaacgccggcaacgtcgacgtcgtctacaactccaacctcaccgtgttgccggagtcggtcttcgaccggttccggcacttcaagagcatcggcatcggcgcctcctgcgacggctacggcgaggtgttcgagcggatccggcagggcgcgaagtgggagaccttcatcgcgaacgtccgccgggcccgctcggaggtcaacctctggctccaggtggcaccccagcgggacaacgtctgggggctgcgcgacctgctggagttcgcccgggccgaggggctcgacgtggacctggccaacgtggtgcagtggccggccgagatgtcggtgctcagcctgcccgaggaggacaaggttcgggccaccggggagctgacctccctcatcgattggtgcgccgggctgggctgggagaagcccgccgccgacctgcgggccctgcggaccttcatgaactcggccgacccggtggacctgccgcccgagatcgcggcctgaccaccggcgggcccggccgggcgtcgagacgaaaggaacaacgaccgtgatcgtggccgcgccggtgcccccgctgggctcccaccagctactgctgttcctgctccaggtgggcctgctgctgctgctcgccgtcgtcctgggacgggtggcgcaacgcttcggcctgccggcggtggtcggtgagctgctgaccggggtgctgctcggcccctcggtgctgggggccctggcacccgacatcggacggtggctgctgcccgccgaccccgaccaggtccacctgctcgacgccatcggtcagttcggcgtcgtactgctggtcgccgtggccggtctgcacctggacctgcggctggtccggcggcgggccggcacgatcggcgcggtggccgtcggcggcctcgcggtgcccctcggcctgggcatcgccgccggcctgctggccccggcggcgcttctcgcggccgggcaggagcggactgtcttcgcgctgttcgtcggcgtggcgatggcggtcagcgccgtgccggtgatcgcgaagacgctcaccgacatgcgcctgctgcaccgcgacgtggggcagatcatcctggctgcggcgtcgctggaggacgctgcggcctggttcctgctgtcgctcatctcgtcggtggcggtgagcaccctcaccgccgggcaggtggtgaccgccctgctttacctcgtggcctacctcgcggtggccgtcctggtcggccggccggtgacccggcgcgccatgcgctgggcgaacgcccagcccgacggcggggccgccagcgccgtcgccgtggtgatcgtgctggccttcgcggcgggggcgcacgcgctgggcctggaggcgatcttcggcgcgctggtggcgggtgtcctgatcggccttcccggcaacggggagccggcccggctggcaccgctgcgcacggtggtgctgtccgtgctcgccccgatcttcctggccagcgcggggctccgggtcgatctgcgtgccctcgccgacccggaggtgctcgccgccggggcggtgatcctggcgctcgccgtgctcggcaagtacaccggcgcgtacctgggtgcacggctggcccggcagagccactgggagggcgtcgccctcggcgccgggctcaacgcgcgcggtgccgtggagatcatcatcgcgatggtcgggctgcgcctgggcgtgctgaacaccgcctcatacaccatcgtggtgctggtcgcggtcgtcacctcggtcatggcgccgccgatgctgcgcgtcgccatgcggcgggtcgaacagaacgccgaggagaccctgcgggagagccgccacctggagtgggccgccacccctgcggtggaccagcggccgggctgaccccgccacctgaagatccgtcgacagcaggggagg

SEQ ID NO: 279 - DNA, 37116 bp, Micromonospora carbonacea africana
gatcctcactcctgcggggtgctcaacagctccaccaggtggtcggcgatggcggcgacggtgggccgctgccagaagacggtcggggagaggctccgcccggtgcgcttctccaggcgtcgccggatcaccaccgtcatcaccgagtcgaggccctgctcggccagcggccggcggggatgcaggtcgtcggcgtcgagtcgcatctccccggcgatctgccggcgcacctcgtcgaacacccgctcgtgcagttcctcgtcggacaggccggcgaaggagaccgcctcctccacctcgccggaactgtcctgcgccggggcgaccggctggtcgatcaccgggtagcgcagcccgggaaggctggccacgacccggccctgagcatccgcgaccagcgcgttcgccgtgtcgggccggtctgggtcgagggcgacctcgatcagcgtcacctccggtggctcgccggtgagcagcacctcgtcgacgtacaccaccatgcgtagctgcggcacgccggggaagacggcgggggcgaccgacatgacggcgtccagcaccggcgcccaggtggacgagtcggccgagcgcacccgcgcgcggagcacgccgtacccggagagcagctcctccaccgaccagtcgaatcccgtcgacggcaccccgacctcggcgagccggcggtggatggagcccgggtcgcccggttccatccggtggtcgtcggggtcggccaacgcccgcgcggcgagcaccgtggcgtcggcgtcggccaccgtggcgtcggtgtggatcagccagtcccggctcgggtcggcctccgcgtcgacggaacgggacgccagccgcacctcggcaccgtcccgcaccacctggacctcgtgcagcccggcggtcatcagcgggtaccgcatcgacaagccggtcagcagcggccggccgtcgccccgcccggcggcagccatgagggtctccaccagcacggccgccggaacgatctccacgccgttgagggcgtggctgcccgggtacgggcggctggcgtcgtcgagtgcggtgcgccacacccgcacgtcgctgcccgccacgttgtcgaccgcgccgagcagggtgtgcgacgcggggtcgtggccccggcccgtggcggcggccggcgtcggccagtgccagtgactccggtgccgccaggggtagccgggcagggtgaccagcggcccggacggatgcacccggccccagtcgaccgcgaccccgtggcagtgcgcggcccccaggctggacaggaaggcctgcgcctccggggtgtcgcggcgcagggtgccgccgacgaagacctcgtcgtcgaggcttccggccagcgtctcgtggatcgagtgggtcaccaccgggtgcggggagacctcgatgaaggcccggtgtccgtcggagacggcggcggccaccgctgcggcgagccggaccgggttgcgcagattcgcggcccagtactcgccgtcggcggtgatcggggcccgcgggtcggccagcgccgtgctgtagatcggcacccggggtgcgcgggcggtgaagtcgacggcggcgcgcagccggtcgagcagcggatccatgtgcgggctgtggaaggccacgtcggaggcgacccggcgtacgcccaggccctcctcggtccactcggcgaccagcgcgtccagcgcggccgggtcgccggagaccacggtcgacgagggggaggaggcgatcgcggcgaccacgtcgacgcggccggccagcctggccgcgacctcctcgaagggcagcgtcaccagggccatcgcgccctggccggcgacctcgcgcagcagcagggaacgacggcagatcagccgtgcgccgtcggccacggtcaggatgccggcggtcaccgccgcggcgatctctccgaccgagtggccgatcaccgcgtccggctcgactcccctcgctcgccacatctcggccaggccgagctgcatcgcgaagatcattgtctgggtccggtcgacggcctcgtagtcgccgtcgaggatcgcctggcggggtgagaaaccgatctcgtcgaggaagatctgctcgatgcggtcgatcgcgtccgcgaaggccggctccgtggccagcagttcccgccccatgcccgtccactgcgacccgtgcccggagaacacccacaccgtgcggggcggctccgccaccgggcttccggtacgcacccggtcgtgcggcctgtcgtcggcgagcgccgcgaacgccgcgaccaggtcgtcccggccggcggccaccgccaccgcccggtgggtcaggtgcgaacgccgccgagccagggtgtgcccgagcgcggcgaggtcgacatccgggacgatcccggccagggcgcgggcccgctcgcgaagggagtgcgcggagccggcggagatcgggaacagcgtctcgccggtcagcgccggggccggctcggcggcgaccggcggggcctgttccagcaccacgtgcgccacggtgccgccgtagccgaagccggagactccggcgcggcgcggccccggccggtccggccagggctggttgcgggtgaccaggcgcagccgcagccgcttccactcgatgtccgggttgacctcggtgaccagcagggtggcgggcacctcggcccggttcagcgccaggaccgccttgatgacgcctgcgacgccggccgcgccctccaggtggccgatgttggacttgaccgaaccgatcaggcagggctcgtcgtccgggcggtcctgcccgtagaccgagccgatcgccgcggcctccatcgggtcaccgagcggggtgccggtgccgtgcgcctcgatgtagtcgacgctgccggcctcgatgccggccgagcgcagggcgcggaccatcacgtgctcctgggcctggccgcacggtgccatgatcccgttggtccggccgtcctggttgacggcgctgccccgcagcacggccagcacccggtccccgtcccgctgggcgtcggagagcagcttgagcacgaggacgccgcacccctcgccacgaccgtagccgtcggcggtggcgtcgaaggacttgctgcgcccgtcgggtgccagggcaccggccgagccgagggtgatcgactgcccgggcgtgacgatcaggttgaccccgccggcgagggccagcgtgctctcgcccagccgcaggctctgcgcggcgaggtgcaacgcgaccagcgacgccgagcaggcggtgtcgatcgacaggctcggcccgcgcaggtcgagcacgtgggagacccggttggcgacggcgcaggtggcggcgccgatgcccgtccaggcgtcgatgtgcggcaggtcctccaactggtggccgccgtagtcgtaggtgcacacgccggcgaagacgccgacgtcggtgccggccagggtgcggggcgggatcccggcgtcctccagcgcctgccaggtcacctccagcatgagccgctgctgcgggtccatcagctcggcctcgcgcggggagatgccgaagaagtccgcgtcgaagccggagatgtcggccaggaagttgcccgcccgggtggccgaccggagcgcggactcgaacgccggacccaggtcgcggtacgcgctccagcgctcctcgggcaccgtcccggtggtgttgcgacccccggtgagcaggtcccagaactcgtcgggcgagttgacgtcgcccgggaaccggcagccgatccccaccacggcgaccgcctcggacgccaccggacgcaaccggtccttctctgcttccacaatcatcccctgctgtcggtttgctgggctgggcgggccgccgcaggtgtccagcgggtcactcccgccacgtcggcgactcgatcacctggacgatcgcgcacgacaccaccacgcccggcgcggtgccgagggtcagcaggtgatcgccggggccgaggccccccgtcctggccaggtgttccagggccagcaaggggtcgctcgccccgcagtgcccgatccggcgaccgaagtcgaaggtggaccggctcatgggcaggccccagttggccaggcagcgctgctccatgatctcccgggaaaagttcatgaaggcgaccctggcgaggtcgccgacctcgatctccgcctcggcgagggcgcgccccacgacctcctcgatgtggtcgccgacgtccgccatggcgatcgaggcggggctgcgggcggcgaactgttggtcgatccgggcggtgaagttcagctcccggccggtcaggacgctcggggggaacagcggctcgtcgccccggtgcagccgctcggcctccgggaccgacttggtgcagaccgagcggagccgcgcgaagccgggtcgcttggtgaggatgagggcgctgccggcatcgccaccgatgaagccggggcccatccgccagcggtcgaccatcggggtgccgtagttgtcggcggcgaccagcagggcgctggtgcgctcgggtaccgcctggaggtggctggcggccagctcgaacgcgctgaacatcccgttgcagccctgccggatctccaacgccagcaggtcgccgccgaccaggtgccgctggagataggagtgcggcggccagccgtcgggcccctggtgccaggtgctggcgtagagcagcaggtcgaactccgtcggcgagccgccccagcgcttgaccgcctgttgggcggcgcgcagcgccatctccggcgcgggcaggtcgccggcgatggccgtgcccgccagctcgtgcagctccacctgctcgcgggagtaaagaccgcggtcgatcgcccactcgacgctcaccgtcggcgggacgaaggcgccgacggcgccgatgaacagatccggtgtacgcactgcgcaatctccacgatttcggcgcacgggcccgtgcggcatcgaccgatcaactgctcgactgctcggcctcgccttccctgcgacggctcaggtcggacggacggaattgggggaagaaaacgagccgtccggtgccggacggttccattacccctttcggaccctatgaagggggcacgcgaattcctatagaggttcacctagtcttggcgggtccggtcggcgtcggctcccccgtcggcgggtccggtcggcgtcggctgcgtcccggcggcgggtgcggtgggtaggctcgcggacgccgccggcacggcggcgggacgacccggcggggagaggatcggcggacggtgacggtgcgcttcatggcacggaccctgcgagggctggaggaggtggccgcccaggagatcgaggagcggggcctcggccgggtcgagcaccgccggcaccgcgaggtgtggttctccgccgccagcgcggagccgcgcctgctggatctgcgtaccgtcgacgacctgttcctgctcgtcgccgtcgccgacggcgtcggccacaccaaggcggacctggcggccttcacccggctggcccgggcggcggcgctgccggcggtgctgccggcccgcgccgcctgcggcgtgcccgggcggccggcgaccgtggacgtcgccgcctccttcctcggccgccgcaactacaaccggtacgacatcgaggacgccgtggggcggcacgcggtggccgcgctcgggttgcgctaccactcccgccgcggcggcgaggccccgccggagggcgggctgtcgctgcgggtcaccgtcgagggcacccaggcgacgctggcggtacgggtggccgaccggccgctgcaccggcgggcctacaagcggtcgtccacgccggggaccctgcatccgccgctcgccgcggcgctggcctggctggccggcatccgccccgggatgctggtggccgatccgtgctgcggcaccggcacgatccccgtggaggcagccgggctggcaccgggggcggtgctgttcggctcggaccacgacccggagacggtcggcgcggccgtcgccaactcggcggcgtcgggggcccgcgtcacctgggcggtcgccgacgccggacgattgccgctgcggaccggtcgggtggaccgggtggtcagcaatccgccctgggaccggcaggtgcaggcgcggggcgtgctcgccggtgattccggccgcctcttcgcggagctgcgccgggtgacggtcgacggcgggcgggcggtactgctgctgcacgagttcgccgaccaggccgacctggcccgcgccgccgggttcggggtgggcgacgtgcggccggtcagcctgttcggcgcccacccctcgatcgtcgacctgcacggctgagccctcagggcacaacctccagctgggccatcatccccagcgacgagtgctccaggtagtggcagtggtagacgtactgcccgaggtacggcgtggcgaaggtgacctggatcttgacagaccccttgggcgagacgtagacggtgtccttgagcccggcgtcctccggcgcgggcggcccgccgtcgcggccgagcacccggaacgtcaccaggtgcaggtggaacggatggtcgaaggggaacggatcggtatccgcgttgaccacgttccagatctcggtgctgccccgcttgacctgtacgtccacccggagagggtcgaacggtttgccgtccatgagcgcgatcgggggccgggccgacatgtcgaagctcatcgacacggtgcgctccacggtcggcgtgcccatcgggggcagtgcgcgcagggtgaccggcacccggctggggtcggtgaccgcccgggacgacacgtcgaagcgcaggatcgggttgtccccgtcgtagaggtagaccggcccgccgcctgcgtgctcggcgaagtcgatcacaatctcgacccgctccccggaggagagcgccagctcggtgtgactggtgggggcgggcagcagcccgccgtccgtggcgatgcgggtgagcggttcgccgcccaggttgagccggaagacgtgcttcagcgccgcgttgagcaggcggaaccggtacctgcgcggggccacctcgaagtagggctgggccttgccgttcgccaggatggtgacccggtcgtccgggtggccgaagacgagggcgccggagtcgtcgaactgggcgttgcgcagcatgatcggcacgtcgtacttgccggcgggcaggcgcaggtgatgctcggccgggtcgtcgatcagatagaagccgtgcagtccgcggtagacgtggtcggcctcgtaggcgtgggtgtggtcgtggtaccagagcgtcgcgccgcgctgaaggttcgggtagtcgtagaccttcgagccgcccggcgggatcaggtccatcgggtgaccgtcgctggtggccggcacgtgcccgccgtgcaggtgcacgttggcgtgggtgtcgagcccgttggtgtaggtgatccgcacgggccggcccgtgcgggcccggatggtggggccgacgaaggaaccggcgtaggtgtaggcgggcgtgagcaggccgggcaggatctgcacctgcgccggccggatggggatctcgtagacgtcgatgccgtcgcggcgggagaccggggtcagccgcggcgggacgggcatcggctcggtgaacggggtgaccgcgaccgtggtcgtgctgacccggctgggcaccggggcggcgtgcccggcgtgcgggttggcgggcgacgccggtgccgcctgggcggcctgcgcgtcccgtctgagggagcgtgacatgacggtgcctccggcggccacgctgccgagggcgagcaactgtcgtctgttcagcacgggagaggtgaccttgtccatgtgacgggccggagtcggtggcgctgcccctgctcagccgccggcaccggatgccggatgttggtgggagggttgagcagcccccggaccggcgcggtccgggccgggggccaccaggggtggaacctcaggcagactgctctgccgccgcctgcgtgtcggccggcttggcccggcggatccccagtcgcggggtggtgaccaggtagaggccggttgccgagtcgaagaggtcgtggctgtcgagcttgcccggcgcctcgctgaccggggcgctcggcgtgcgcgcgtcggccatccggcgggcctcctcggcggccaggaagagctgccggacggagttgtcctgctccgccggtgccgccgccgcggtgctgtcgtgccgtccctccgccgcgtcgtccaggtcggcgaggccggcgacgagctgggcgaaggcgcgggccccgtctaccttctcgtactcgggttcgccgctgtcgtgcaccagcgcgtcggccaggccgaagtatgccctcttgccggcctgctgctggtagacgccggcgacgagggtgaacaggcgctggtaggcgttgcggtagagggactcgtagaacgcccgcgcctcctcctcggtgacgtcaccgtggatggtggccaggatggacgccgaggcgagcatgccgctgtagagggcgaggtgcacgccggtggacagcagtgggtccaggaagcaggcggagtcgccggccgcgaagtagccgggcccgcagaagctgtcggagatgtacgagaagtcctgctccacccgcacgcccggctggtacgtcccgttcgccgtcaggccgcgcacggtcggggactcctgtaccagtgcggcgagcatgtcctccagcgaggcgtgctccttgcgccgctccaggaagcggctctggtggcagacgaagccgatgctgtaccggtcgccgcgcagcggaatgacccagtaccagccgtcgggcgcggagatgacgttgatcccgccggagggagagttcggcagcagcgagccaccctgccagtagccccagatggccacgttcttgaacgtctcggtggggcgccggtgcttgaagtgctgggacgggatcagcccggcccggccggacgcgtcgaccacgtagtcgaaatcgatggtgcggacctcacccgactcggggtcgaaccactcggcggcggtggcccgctcaccgtcgaacaacacccgcttgacagccgcgccctggatgatcttggcgccctgcttgccggcgttgttgagcaggacgtggtcgaagtcgtcccggtcgacctgccaggaccgcacgcccggaccgaagatcttggcccagtcgatggcccagtcctcgttgccccagcgcagcaggaccccgttcttctgcgggtagccccgcgagtcgacctcgtcgagagcgcccacgaaatcgacgatggtgcggcacgaggacgcgatcgactcgccgatgtggtatcgcgggaacgtctccttttccaggagcgtcaccgacagccccgatcgggcgagcagcgcggcggccgtggatccggccggacctccaccgatgactaggatcttgctggacatcgagctccaatccgagaatctgtgtctgtccgctcggcacgggccggcccgtcgaccatcgccagacaggggaatggacggattccggatcgcgaaaagaatgttaggtcgccggtgaattcagctctaccgtcgacgaggaaccctaggaaatccgctagtagttcggcgcgcgcccgctgctggcggcgggcgcggcgacgtcgcgcgccggttcgggtgccaccggtgccgacgtcaacggggtgacccggcgcaggaaccacgccgccgcgacgcagatcagccccgccagcacggtcatcaggaaggcccaccgggtgccggaggccaccgcgtgcatgaagtggacacggacggcccgggggagttgggccagcccggcggcgtccagccgcgcggagtggccgaggaggtcagccacgtcggcgaccccccgatcggccagcgccgactgcacccgcacggagaacagcgagaccgtcgccgacgcccccaccgccccaccgatggtgcggaagagcgtggacgtggaggcggccaccccgaggttcctcatctccacgctgctcagcgccaccatcaggctggtctgcatgagcagccccagccctgcgccgaagccgaccatggggatcgcggtgaccgtccggctggtgcccacgtccatcagggcgaagagcagcaggctcagggtcatcagcgccgcaccggcgagcatcagcagccggtaggaacgcccgccgctcatcaggcgacccccgaccacgttgaccgccgccatggacagcagcaggggcagcagcaacaggccggagtcggacgcggaggcaccctgcaccgcctgctggaacagggccaggaaggtcagccccgcgatgagggcgaagccgaccaggaaggcgatgagggtgctcagggtgaagttcaggctgcggaacatggccaggggcaccaacggctcggccacccgtcgctcgaccaccacgaagagcgcgcaggtcagcaccccgagcgcgaccagccccaggatcatcggagacgcccaggggtaggtgatgccgccccaggtggtcaccagcacgacgcacgaactgaccacggtgagcagggcagcacccgcgtaatcgatccgggccttggtgtgtcggcgcggcaggtgcatcatcagcaccacgatgagcagcgcgaccgccccgatcggcaggttgatgtagaagcaccagcgccagccgagctcatcggtgatcaggccgccgacgagcgggcccgccaccatggtcaggcccatggtcgccgacatgatgccctggtacttgggcaggtcagggccggcgagaacctccaccatgatggcgaacgcgcagaccatcaggccgcccgcgccgagcccgtgcacggcccggaagacggtcagctgggtgatgctctgcgccatgccggacagcagcgacccggccaggaacacgaccagcgtggccacgaagaccaccttgccgccgtacatgtcggcgagcttgccccagaccggcgtggaggcggccgtggccagcgtgtacgaggtgatcacccaggagagcgtgctgaggccgcccaactcgccgaccacggtgggcagtgcggtgccgatgatggtgttgtcgagggtggccagcaccatcgggatcatcaccgcgaccaacgcgaccatggcgcggcgacgtggcaggcgggctgggggtgctgcggccgcgggccggctctgcgacatgagccctgctctctcaccggaagttggcgccttcgtgaacccggcccggctcgcgggccggctggcagcctcgccgacgttagggggacaaaacggtggagtcaagcagttcgcatcggcgggcgacgatcccgaagagcttcggtggaaggtgtccgggatgggtccgccggccgaacggggcgatcctgccggtccgggccgggcgtcgctgccggcccgccggaaagtactactagtaacctccctatattgctttccgggtcgctgaatccgcttggagattcgcgtaccgtgagcgcggtagcgggagatccgaccccatttcgaacgggcggatctttggtccgccatcggcgcgaggtcacgcctcggccaggtggcttcacggctggagactaccctgacacggcgggcgctgatcactggaattaccggccaggacggcacgtatctcgcggagcacctgcttcagtccggatacgaggtatttggattggtgcgcgggcagaccgcgccctcggtccgcagccttcggcaacctgatccagcggtcaagctgatcagcggcgaccttctggatcagacgagcctggtggcggcgatcgaacgcgcggcgccggacgaggtctacaacctcggcgcgctgtcgtacgtgccggtgtcgtggcggcagtccaccacgacggcggaggtcaccggcatgggtgtgctccgcatgctcgaagccttgcggatcgtggggggcctgtcggattcccgcagtcccgcagccggtcagccgcgcttttatcaggcgtcttcgtcggagatgttcggcaaggtgcgggagcccgtccagaatgagctgaccccgttccatccgcgtagcccgtacggcgcggccaaggcgttcgggcattacatggtgcagaactaccgtgagtcgtacggcatgtatgccgtctccggcattctgttcaaccacgaatcaccggtgcgtggtcccgagttcgtcacccgcaaggtgtcgctgggcgtggcggcggtgaagctgggcattcgcagctcgcttcgcctgggcaacctctcggccgagcgggactggggcttcgcgggcgactacgtgcggggcatggtcctgatgctggcccaggacgagccggaggactacgtcctcggcacgggggtcacgcacagcgtccgcgagctggtcgaggcggccttcgcccacgtgggcctcaactggcgggaccacgtggtggtggacgagtcgctcatccggcccgccgaggtcgagctgctctgcgcggatccgacgaaggcccgccagcggctcggctggaaaccctccgtctccttcgaggagatggtcgccatgatggtcgacagcgatctgcgcctgttggcggacacggacgggtcttcccacgccttttccgccgaactggccgagctgtggtgagcgattcgtcgcccgacccgaaggtccgcgccgacgggccgttgctgacccgggacgcgggcccgcaccggcccggcccggtcgacggcggctcgtggtcggcgttgcacgccgagggggtccggccggacttcctctcctggttcgccgagcggacccggtcgacctactgccgggtggaccgcgtgccgctggaccggctgcccgggtgggcgttcgacccggtgaccggcaacctcgggcacgagagcggccggttcttcgtgatcgaggggctgcacgtccagaccacctacggcgcggtgcgcgaatggcaccagccgatcatcaaccagccggagatcggcatcctcggcatgctcgtcaaggtcgtcgacgggacaccgtactgcctgctccaggccaaggtggagcccggcaacatcaacgtcatgcagctctcgccgacggtgcaggccacccggagcaactacacccgggtgcaccgtggcggcggcacgaagtacctcgactacttcacccgcccgggggccggtcgggtgctggttgacgtcctgcagtcggagcagggctcctggttcctgcgcaagcgcaaccggaacatggtggtccaggtcgacgaggacgtgccggccggcgactaccaccggtggctcccgctgcgcgaactgctcgcgctgctgcgggtggacggcctggtcaacatggacacgcgtacggtgctgtcatgtctgccctcggccttctacgccgcggcccaggagaccgaggcgccgtcgtcgccggcggtggcggcgatcgtgcgctcggcggcgggcgcccccggccgccacgacctggtgtcggtgttgagctggttcaccggggccaagggccggcacgagatgaccgtgcggcgggtgccgctacgagggctgccggactggcggcacaccgcggacgggatcgcgcgggacgacggccggcacttctccgtggtcggcgtcacggtgcgcatcgacaaccgcgaggtgaccgggtggagtcagccgctgttgtatccgcggcaccggggcgtggtcgccttcctggtcaaggaaatcgacggagtggcgcacctgctggtgcacgcgcgctaccaggcggggctgctcgacgcgatggagatgggcccaacggtgcagtgcatcccggacaaccagcccggcccccgaccactgttcctggccgaggtgctggaagccgcccccgagcgtgtcctctacgacaccgtgctcaccgaggagggcgggcgattctaccggtcggagaaccgttacctcctggtcgacgccggcgacgacttcccgaccgaggtgccggacgagttctgctgggtgacggtgcgccagctggaggccctgctccggcacggctactacctcaacatcgaggcccgcagcttgctggcctgcctgcgcagcctgtggtgacccgatggcggagatgacggtccgcatcggggttctcggctgcgccgacatcgcgcgccgccgtgccctgccggcgatcaggcgggtcccggaggcggagctcgtggtggtcgcggcgcgggaactggccaaggcgcgcgccttcgccgcggagttcgggtgcgccgccgccgagggctaccagtccgttctcgaccgcccggacatcgatgccgtctacattccgctgccgaccgggctgcaccacacctggatcgaacgcgccctggccgcgggcaaacacgtgctggtggagaagccgctgaccacccggctggtcgacaccgcggcggtgctgacccaggcccggtcgcgtgggctcgtgttgatggacaacctcaccttcctccgacatggggtgcaccacttcgtgcgccggatggtcgcggccggcgagatcggcgagctgcggatggtctccggcgtcttcgggtttccgccgctgcctgcgggcgacatccgttaccgacccgagctgggtggcggagcgctgctggatctgggcgtctacccgttgggcgcggcccggttcttcctgccggaggagccggaggtggtggcggccaccctccgggaggaccccgatcgcggcgtggacgtttcgggtgccgcgctgttgtgtacgccggacgggcggaccgcacagatcgccttcggtttcgagcactcctaccggtgcgagtaccagctctggggaagcgccggccggatcgtcgtcgaccgggcgtacaccccaccgccggcctggcacccggtggtgcgggtggagcggcaggacgagacgcgggagctgaccttcccggccgaggaccagttcgtcaacacgatgcgagagttcgtccgcgccgtcaccgccggtcagccggcggaggaggtgacggcgatccgcgcccgggcccggctgctggacgaggttcgcgaccgggccagggtgttgcgcgcccccgtgacctgtcaggggccgggcggtcgcctggacgccgccggcgcacgagactgatccccaggaggtacggatgggcgcgcggcgtgtcgtggtcgtcggtggtacgggcttcgtcgggcgtcacgtgagcgccgcgcttgccgcccggggcgacgacgtcctcgtgttggcccgccgcgtcccgtcggcggggctgccgtaccgggcccgggcgctggacgtcgccaccctggagcccgccgcgctggccgccgtgttcgacgccgagcagcccgacgcggtggtcaacgccaccggcggcaagtggaacctgacggacgccgagctgccgtcgagctgcacgatcccgacgtggagtgtcaccgcggcgctggagcgcacccgttgccggcccaggctggtgcacctcggctcggtcctggaacgcgtccaggagccacccggggctcccgccggtgccacggtgcccacccagccggagagcatgtacggcagggcgaagctggccgccacccaggccgtgctcgcggcgacgcgggccggctcggtggacgcgacggtgctgcggctcgcgaacgtggtgggtccgggcgtgccacccgacagcctgttggggcgggtcgtcgttcgcctggtcgacgcggcgggccgcgaccggtcggccagggtggagttgtctccgttgcgcgcccaccgggactacgtcgacgtgcgggacgtcgccgaggcggtggtgtcggccacgcgggagtccgtcaccgggcgggtgatcggcgtggggcggggggaggccgttccggtccgctccctcgtggagatgttgatcgaggtgagcggggtgccgaccgaggtggtggagttgccggatcggcccggctcggtggaggtcgtcgactgggcccgcgtcgacccggggcccgcgcgtgacctgctcgggtggcggccccgacgatcgctgcgggatgcggtgggcgggctctgggacgaggccgcgagtcggcttcccgatcggtcccggcgctgaaccgtcgggtggttccggccccgcgcgcgatgccggtccgcttgcagggctgacaggtcgccggagatcttcgtgccggccccgcgcgcgatgccggtccccgcgcggggcgacagccggcgagcgacccgctgatcacgacgccggacggtgtccgggcccgtgcccccccagcggcggtgaggctaccgggacggggtggacgtcgtcgttcgcattgccggacggtcggcctgctcacggtgcggagtggttgatcttgacgggtgggcaatttgttcgggcaattgattgacgggtgggggatcgacgctcgccagactaaggaatcccctaggaatgtgctggtgtcgctctggtcgcgattccgccccttttgtcagggtggtgggcctggctggagctgggttgtctaaagtgacacatgtcactgcatggatttcccgcgcctgcttactcatggtcttgagcaggggttttgtcgccaggtgcggctgagatgaaagatcctgccagttctgcatggaagcctggcgatatcctcggggggtggacgctccgcagtgggccggctacgcttttggcgtattggtgagttcagcgcgagcgacagggccagccgattgtcactttccgtaactatcggctcgaatccggtcggtttcatttcgccagtgatgtcgatcgacagtagcgaagggcttcgaaactcaatgttcctccgctggttctgtgcagcgcgaaccgatgggttgccgaagttggagcccaagccgacaggcccgtcaggcgggctacgtgccgggggcatcgccgcacactgagacagctccgcaagcgcaggacgacgagtggcgggcacccggccttccgccgctgacggtcttccagcggaagcgaccactcgtccaccggcacctcaggggggtgtccgggcgatgacgtctggccgcgtacgagccaacagatccacaatcaagggggcgttgtgaatctcaagttctcactgtccgatctggacgcgcgcatcatcgaaagcatcgccgcaggcgaacggacggtgcatatcgccaacaaggtctacctcagccgtcagggcgtcgagtaccacgtcagcaagctgttgcagaacctgcgagtgcccaaccggccggccctgatcgcgaaggcgtacgcgatgggcatcctcgcggcgggcacctggccgccgaccgtcagcaaggacgaagcggcctgagctccgcccccggccgctcaccggacggcccgccgcgctgcggtgcgccacctgtccgtggggcggccggggccgcggcacgctgccgcggagcgcgatccggtgggccgcctctccccgccggccccacaacgctcatgtcgagggacgatgccgaacaacgcctctgtggtcagccgcgatccgtccgaccacccgatggtggtggcgatctgcgcgttccgggtggagaacgtcaggaaacacctcgcgcacaacatggcccagctctccggcgacgagtactacgtcctgctggaccggcccgtcacggccgaggcggaggaggtcgccgaggaggtccgggccgccggcggcaccatgcgcatcctcggtgccaccaatggcctgtcggcctcccgcaacgcgatgctcgcccgctggccgcaccaccatctgatgttcgtcgacgacgacgtgcggctcgacgccgctgccgtcgacgccgtccgcaagagcctgcgcgacggcgcgcacgtggtcggcacccggctggcccgccccgcgctgcgtctgccgtggtacgtcacctccggccagttccacctggtcggctggcaccgtgaccagggaaacatcaagatctggggcgcgtgcatgggggtggactccgcgttcgcgcacgcccacgggttggatttcgacctggccctcagccgtaccgggggcaacctccagtcaggggaggacacctccttcatcagcgccatgaaggccgccggcgcccgcgagcaactgctcccggaccacgcggtcacccatgacatcgacccgggccggctgaccccccggtacctgctgcggcgggcgtactggcaggggcggtgcgaggccggacggaaccaggcacgggccggcctgcgcaaggaatgggaccggcaccgtacggccccggaatcccggctcgccctgccactggccctcggctacaccgcggcgaccgccgccgggttgagccacgaactgctgcgaagggcgcggttgcggcggttcccgcccccgagacgctctcccgagccgggctgacggtcgggccggggaaccccccgggccgcccgcccgggtgaggacggcctcccagcactggcggacgccgtcggggaggctgatccgcgcctgccagcccagggtctcccgggcgagggtggtgtcgagccagttgccccgatggtcgaactgccggcggacgtcccggatgacctccagctcacgaccggccaccgtggacatcgtctggagcaactcggcgagggaggtgggcaggcccgagccgacgttcacgaccgtgggcagccggtcccggtcgccgtcaccggcccgctgcgcgatgacctccatgatcgcggtgacgtcgtcgacgtgtacgtagtcccgcaccacggccggatcgccgaagagccggatcggctctccgcgcacggtggcctccagccagtgtgacaggacaccgtacccgggggtcggccgctgccccggaccgtagacgttgctcagccgggtcaccaccggctgcacccggtcggtgtggcgcagcagctcctgttccagccgcagcttcgcccggccgtacgccgaggcgggcccggtggccgaccgctcgtggtagggcggccacaccgtcggcgtgtacaccgccccgcccgagctggccaggacgaacaccggccggtggtccacccccgccagcgcacttagcacgtccagcaacaactcgcgttcccggacgacccgttccggttgctgctccgccagcgccgggctcagccgggcggcgaggaagtagacgacctgcgcctcgcggagccccggcgcgggccggccgtcgacgacgggtggggcggcacggctgaagcgcgccaccggatgcccggcctcggccaggcgggagacgaggcgtgagccgatgaagccggtggcgccgaccaccgctgcggggcgtcgcaactgcactccttcgtcaaagtccgccggtgccggcgttcgaacgcggggtggcactcgtcaggggagagtcggccagggccgccagggacgccacggtggtgacccgggcgtccgcgggcggggagccggtgcggaacgccctcagctccgtgtagacccggaccaggtccggatggacgcccggcggccggcggtacgccggatcgggcagcacgaacgccaccgggcaaccgagcccgagcgcgggcaggacgtcgtgatccgtccggttgcccaccaccagcaactcggcgggcgggatcgccagccgccgcagggcgagcccgagcagggccgggtcgggcttggccaccccgacgagggagtcgaggagcacctcccggcagacctggctgacctgccaccgggccagtacgtccgcgcactcggggggctggttggcgacgatcacgacgggtagttccctggccagcctggtgaccgcgcgaacggcaccgggaatctcctgggccagctcgccccaggactgccggacccgcgaccagctcagcgcggcggcctccgagtggagccaggtccggccggttgggtcgccctcgccgtagtggtagaaccgctcgacgtgctccagaaacgcacgcaggtcgagcgtcgggtcggtggcctggaggcggtcgaaggtgtcctggagccaggccagctcgaacggctcgtcgtagtagacgaccccgccgacgtccagcgcgacggcgctgtgcccggtcatccccaaaccccccaccgacatcgaggacatcgaggcgagtctcgcacggggatgaatggacaatcgagagcgcgtgccgttctggcagcggcgcggaccgaatactagtcgaatccctatttcccgctcgggagcggtatcgccgcgctgttcctaccgtatggtttattcgcggacaggctattccgagaggtggtcaaatggccgtggggactgttggtgcggaggtcgtcgaccgtcggctggaggcttaccggcgcgatggcttcgtgactctcccgcagctcgccgacgacgccgaggtcgcctggctccgggccgcctacgaccggctcttcgccgatcacgcgtcgcccgacaccggcgactaccgggacatcgccggccgtggcgacgacgccgcgcctgcccgtctcccgcagatcgtccggccggagaaatacctgccggagttggtggagaccgcgcacttcgcgcgatgccgggccatcgcctccgctttcctcgacatccccgaggacgaactcgacttctacggccacgcgatcctcaagccgccgcgctacggcgcacccactccgtggcaccaggacgaggcgtacatggacccgcgctggtcccgtcgcggcctgagcatctggaccccgctcgacgaggcgacggtgtccagcggctgtctccagtacctgccgggcctgcaccggggcggggtgctcccgcaccatcacatcaaccacgacgaccgcatcgaaggtctgatgacggacgaggtcgacgacacggacagcgtcgcctgcccgctgcggccgggcgaggcggtcatgcacgacttccgtgcgccgcactacgccggcccgaacgagacggaccagccgcgccgcgcgtacgtcctggtgttcatgagccagccggtcgaggtgaccgaccccgagccgcgaccctggctgcacgaccggagctgacctggccgggcgcgccggtgtcggaccgccgacaccggcgcttccgcgtgcggcgggcaccccctacggtcgcgaccgtagccgccgcccgggccggctcaggaccagcgcgcgccggccagcacgtcgcggtacaccgcctcgtagcgccgggcgatctccacgtgcccccagcaccggatcgcggccttccgcgcctgggcgggcgacggcagtcgggacagcaccgctcgggcctcccgctcgtcgaagccggtgccgaagcccaccacctcgccgacggccggcacgatctccgccaggcagccgttgctcgtgccgaccaccggggtgccgctggccgccgcctcggacaccacggtcgcacccggctcgcaccacgtgccgccccacgggccgggcaccggctgggagagcaccaggatggcagccgccgtggcgagcaggtccatacgttcctgaccccccacctcgccgacgagggtgacgtggtcgccgtactcgcccatgatccggtcgaggtactccggctcccaggccggaccggccatcagtagccggcggccggcggcccgggcgaacgcggccgcctccagcgcgcccttgaacggggagatccggcccatgaagagcaggaagtcgtccttgcggtcgccggggcggtagagcgacggatccaccccgatcgggatgaccggggcgtccgcgccgccgccgcactgctcccgctgcgccttcgaggcgtacacgcagccggccggataggacgggcgggtggtcatgtggtgcgaggccaccaggccgacccccgggggcagctcgatcggatccaccttgccgcagctgtagtcgttgacgacgtccaccggagcggacttcaaccatgcccggatgtcctcgggctcgcccgccggcaccacggtcaggcgtggatgcgtacgcggactgcccggggcaccgagcaggaacacctcgtgcccgagttcgagcaggcccttgatcttgttggccacgatccactggatcccgccgtacccctgcggcgggaccgtgatccactgccgctcgtcgctcggcaaccggaacggtatgttgaccatcgcgatccgcaggggggtcatctgctcctcattcctcaggccagcagatcgagcaggtcccgcaggacgcgagggtagccgtactcgacgcggagccggtcctgaatctcaccgaccagtcgtccgtaccgttcgtgctcggccgagagccggctcagcgttccggccgggtcgtcgccgagcatcaggtgttccgcctcgtcgccgtagaccggcgcgaggaacttcgcggcgaccgggagcacgggcaggctgcccgaggccagcgtctcgaacatccggggggtcaacaggccggtgctggtgaccagcggccgcaccaggaccggtgagatcagcgaccggcccatctgctcgaccacgtggccgaacggcacgggcggatgcacctcgacgccgcgcgcccgcagccagcccggctcgctgagcgtcgcctcctcgaagcccgcgcaactgccgccgtcccaccagcgtccgcacacccgcagccggcgcagcggcggccgggccgccgccgcggcctcgaccatctcggtcatcggctcccaccgccaccagttgctgccgatgtactggaggtcgtacgggcgcgactgcgcgccggtgcccagttccagcgggtgccgcaccggcgctgccaggccgaagcacttgaagaaccgggcgccggccgggagcggacccagccggggttgcaggatcaggtcgctcagggtcgagtacaaccgccgccaactctccgcggagtaccggcccgacgcgctgtcgccgtccccgccctcctcggcaccccagtgcccgtcgaagtcgacgatggcccggcgctgtcgggggaacgcctcgacgaggtccagttgcgcctcggtgaggaactgcttggcctcgaacatgatcaccaggtgggtgccccagcggaggtccggctcgaccggcaggtgccgggccgtctcggcgtcgacccgggacagcgggccgcagagccgcacctcgcagtcggcctcccgggccgcccgcacgtacgcggcgacggtctggctgaacccggcctgccagtggaagttgcccgcgacgagaatccgtggcctgctcatccccgcacggtttccttccgctctcgggcgcggtccacgcccgtccctcgtgcccgcagcagccggtgccgccgacgacgttcccggatcaccggggcctggcgggccagccacccgagcgccacgaaggtctcccgcgccccgacgcccgcgctcgtccgacccgtcacgccccgcccacggacgtcggagaacagccagcgggcggcgagccgggcggccttggccgggggccagtccacatcggtcagcagatagtagtagcggttgcggcgcatgtgtatccggctgtacgcgctcgcggcggtgccaccgccgcctttgtgctggatgccgaggtcgagtaggagcgccacccgccagcccgcccaccgggcccgccggcacaggtcgacctcctcgtagtaggtgtggaacacctcgtcgagcaggccgacctcgcgtagcacggcggcccggacgaacagcgccgagccctgcacgtacgcgtgctccagggtgcgcggcgcgcggtcgcggaccgtcgcggtgacgtgcgagggatgatccagcaggtcgccggcgaaggtgtgctgctcgcccaggtagagggcgacctgcgtccagtcgttgaagtcggtcaactcggtcgacgccgggtcgtagcggtactgcaacgggccgatgacgccgtactgcggccaccgctgcgcgaactcgaccagcccgcggaccagccccggcggtgtccaggtgtccgggttgaccaggaagatgtggtcgaagccctccgccagggccgcccgcatgccgacgttgttcgcgccggtgaagccgagattgcgggggtttcggatgacccggacgccgggaaacgccgacatgacgtgcgccacgctgccgtcggccgaggcgttgtccacgtagaagaccgtcagctcgaagccggtcgtgtcgctggcgagcagcgagccgagcgcgcggtccagccaacggatctcgttggtgccgaccgtgatggtggcgaccctaaccggcggcgttgacccctcgcgggtcatcgctccccccggaccggttcgtccgcctcgacccacttgtagaccttcgcgatgccgtcggcgagcctcgttcgggccgcccagcgcagctcccgggccgcgcgggtcacctccagcgcggagtgcttcagctcgcccaggcggggtggctcgaagcgggggtccgggacgcgcccggcggtgcggccgaccaggtccagtagtttgcggatgctggtggaggtcccggtgccgatgttccacaggccggggccaccgtgcccgaccgcgagcaggaacgcctccaccacgtcggccacgtagatgtagtcccgggtctgctcgccgtcgccgaacaccgtcggccggcgcccggccaccaggcagccgcagaagatcgagacgaccccggcctcgccggtcgggtcctggcgtggcccgtacacgttgccgagccgcagcgccgcgtgggtcgagccgtagagccggttgtagagcgccaggtactgctccgcgcagtacttggcggccccgtacggcgcccacggcgccggccggacgtcctcgggggagggcagctcgtcgacctccccgtagagggcgccgccgctggaggcgaagaccacccgggcgtcgatggcccgggcggcctccaggacgttgacggtgccgaccacgttgaccccggtgtccgaggtggcgtcggccaccgagttgcgcacgtccgcctgggcggccaggtggcagatgacctccgggcgacactgctcggccagccgggtcaacccggcccggtcggtgatcgacccgtggtgcagcggcaccccggcgggcagccgctcgggccgcccggtggacaggtcgtcgagcacggtgacgctgtcgccgcgttcgagcagcgcgtcggtgaggtgggagccgatgaacccggctccgccggtcacgaggacgcgcatgtcaggccccgggtcgcgaactcggtgagctggcccacgacctccgtggggccgggcatctcggcgatctcccgggcgatcgcggcggcgctggtggcgtggaccggatcctccagcagcaggcgggcgaccttgcccacggcctccggcgtgtcctcgcccggcgcgagggtctgcgccacgcccagggtcgacaggttgcgcgcccactcgatgaaccggctctcctgcggcacgatcagctggggcacccccgcgttcaaggcggtcagcgcggtcatcgtgccggagtggtgcacgatcaggtcacagtggggcagcaccacgtccagcgggagccagccggcgtgccgcacacccggcacgtcgtgcagggcccgacccacctccggcggcgccgcgaccacgacctcgacgtcctgctcggccagggtgccggccagtccgtggaggaagtcgaagttgtgggtggtggtgaccagactgccggcggtgaccaggacacggcgacgcggcccgcgcgagagcatccacggcgccaccggctgctgctggttggtcggaatccagcgcagcggtcgcaccggctgcgccggcgggacgtcgtcgatccgggtgctggccgggaagatgtccagggccaggtggaacggcggcacctgggccaggccgagcgcggccagctccggccgcagctcctcgtcgacccccggatgggtgccctcgcggtccaccgggttgccggtgagcaggtgccgcacgcagggcaccccaagttcggtggccaggatcggcgcggcgtaggcgtgcgggccgccgacgatcaggtcgggccgccacccgccgaccaggtcgcgcagcggatccaggctgatcgccgccagccggccgaacatccggccgacgaaggggacgaaggcggcgtcctcggccgggatgcgcagcggatcgccggcccggtcggtggtcatgagctcggcgagggtcagcgccgccagcgggaaggccggcagcccgacggacatcgtcgccggtacgacctcctgcgtggaagccatcacgacctcgtgcccgctcatccgggcggcgattgccagtggggccaggccgaataggctggacttcgtcggtcctgcgatgaacagtatcttcacgagtcctccgcacgtgtcggccgaatatatagcgacgtcaaccgctggcccatggttcacggcttctgcgggggaagctcgagtgatccaactagacttggcgaactccggcgcacgacaggggtttcgccaagccgttgccgcctattctgggtatccctgtcgagcatcgtcggtggacaatcagccagcaattggtgatcgccgcgcaccctgatagcgacaggttcggcacagcgcgaacggaagcaggcgatgtctaatctgaccgaggagagatgggtggcggcggatcttcgcgcgccgctcacgccggcggggcgcacggtggtcgacctgcttgccggcgtgatcccgagaatcagtgcggaggccgccgaccgggaccgcaccggcaccttcccggtggaggcgttcgagcagttcgcgaagctcgggttgatgggcgccaccgttcccgccgagctgggcggcctggggttgacccggctgtacgacgtggcgaccgcgctgatgcggctggccgaggccgacgcgtccaccgcgctggcctggcacgtgcagctcagccggggcctcaccctcacctacgagtggcagcacggcacgccgccggtgcgcgcgatggcggagcggctgctgcgggcgatggcggagggcgaggccgccgtctgcggcgcgctcaaggacgcccccggcgtggtcaccgagctgcattccgacggcgccggcggctggctgctgtcgggccgcaaggtgctggtcagcatggcgcccatcgcgacccacttcttcgtgcacgcccagcggcgcgacgacgacggctcggtgttcctcgccgtgccggtcgtgcaccgcgacgcccccgggctcacggtgctggacaactgggacggcctgggaatgcgtgcctcggggacgctggaggtggtcttcgaccggtgcccggtccgggccgacgagctgctggagcgcggcccggtcggggcccggcgggacgccgtgctggccgggcagacggtcagctcgatcaccatgctcggcatctacgccggcatcgcccaggcggcccgggacatcgcggtcggtttctgcgcggggcgcggcggcgagccacgggccggtgcccgggcgctggtcgccgggctggacacccggctctacgcgctacgcaccacggtcggcgcggcgttgaccaacgccgacgcggcgtcggtcgacctgtccggcgacccggacgaacgcggccgacggatgatgaccccgttccagtacgcgaagatgaccgtcaacgagctggccccggcggtggtggacgactgcctcagcctggtcggcggcctcgcctacacggccgggcacccactctcccggctctatcgcgacgtgcgggccggcgggttcatgcagccctacagctacgtggacgccgtcgactacctgagcggtcaggcacttggactcgaccgggacaacgactacatgagcgtgcgcgcgctccgctcccggacctcggcgtagaagggcgaagatgaccatccgagtgtggggctacctgccggagtacgagaaggaacgggacgacctcctcgacgccgtgcagacggtcttcgagtccgggaacctcatcctcggcgcgagcgtgcgcggcttcgagcaggagttcgccgcctatcacgacatgccgcactgcgtcacggtggacaacggcaccaacgccatcaagctcgcactccaggcgctcgacgtcgggccgggcgacgaggtcatcaccgtctccaacacggccgcgccgacggtgctcgccatcgacgcggtcggcgcgacgccggtcttcgtggacgtccgcgccgacgactacctgatggacaccgagctgctggccgaggcggtcaccccccggacgaaggcgctgctgccggtgcacctctacggccagtgcgtcgacatggacccggtgctgcgggtggcccgggaacacggcctcaaggtcctggaggactgcgcgcagtcgcacggcgcgcgtcggggcggacggctggccggcacgatgggcgacgccgctgccttctcgttctatccgacgaaggtgctgggcgcgtacggcgacggcggcggcgtggtcaccgcggacgccgtgatcgacgagcggctgcggcggctgcgctactacggcatggaacaggtctactacgtcgtcgagacgccggggcacaactgccgcctcgacgaggtgcaggccgagatcctgcgccgcaagctgtgccggctcgacgactacatcgccgggcgccgcgccgtggcccggcgctacgaggagggcctggccgacatcgccgaccaggtcggcctgaccctgccggtgacggcgaccgacaacgaacacgtctggtacgtctacgtggtccgccaccccgcccgcgaccgcatcctcgaacagttggcggcgcgggacatcgcgctcaacatcagctacccctggccggtgcacaccatgaccggcttcgccaagctcggctaccagaccggctccctccccaccacggaacggttggccggcgagatcttctccctccccatgtatccctcgctgccgccggagacgcaggaccgggtgatcgacgcgctgcgcgacgtgctcgcggcgctctgagtcgccggccggcacgccgcagccgagagctggacgacccatcccgacaaggagacgtcgttgacatccgcccctgcctgaggcaggggtatccatggaaggaatgcgatgaccgattcagccgacggcacgccccggcgcggcacctgccgggcgtgtggcggcaccaccgcccagttcctcgacctgggtcggcagccgctctccgaccggttcctcaccgaggaccagctcgcggacgagttcttcttccacctggcggtgggggtctgcgcgggctgcacgatggtgcagctcatggaggaggtgccccgggaggagatgttccaccaggactacccgtaccactcgtcgggctcctccgtgatgcagaagcacttcgccgacaccgcgcggcacctgctggagcacgaggccaccggcccggacccgttcgtggtggagatcggctgcaacgacggggtgatgctgcgtaccgtccacgaggcgggagtgcggcacctgggcttcgagccgtcgggtggggtggccgatgtggcccgtgggcacggggtgcgggtggtcaccgagttcttcgaggagtccaccgcccgccgggtcagggagaccgacggccccgccgatgtgatcttcgcggccaacaccatctgccacatcccctacctcgactccatcctccggggcgttgacgcgctgctggcaccggacggggtcttcgtcttcgaggacccgtacctcggggacatcctggacaagacgtccttcgaccagatctacgacgagcatttcttcttcttctcggcgcggtcggtgcaggcgctggcggcccgcttcggcttcgcgctcgtcgacgtggaacgccttccggtgcacggtggggaggtccgctacaccatcgcccgtgccggcgcgcggcagccggccgagcgggtggccgcgctgatcggcgaggaggacgcccgaggggtcgccgaccgcagccggctcgacaggttcgccgccgacgtcgagggcatccgcaccgacctgctcgccctgctgaactcgctcaaggccgagggcaagcgggtggtggcgtacggcgcgacggcgaagagcgccaccgtgacgaacttctgcggcatcggtccggacctggtctcctgggtgtgcgacacgacgccggccaagcagggccggctcacccccggcacgcacatcccggtgcgcaccccggacgcgttcacgcccgacgcggtggactacgcgctgctcttcgcctggaaccacgccgacgagatcatggcgaaggagcaggagttccgccgggctggcggacagtggatcctgtacgtcccccgcgtacacgtgacgagctgacccgccggtgtccgcccgcccgctgaccgtcgaaggcgcgtacgccttcgcgcccaccgtctacccggactaccggggggtgttcctctcgccgtatctcgactcgttgttccgggacacggtcgggtacccgctgttccccgtgcggcagaccagctacagcgtctcccgccgggggacgctgcgggggctgcacttcacccgtaccccgcccggcaccgcgaagttcgtctcctgcccgcacggccgggtgctcgacctggtcctcgacgtgcgggtgggctcaccgacgttcggcaagtgggacagcgtggtgctcgacagcgaggagttccaggcggtctacctgccggtcggggtcgcgcacatgttcgtcgccctggccgacgacaccgtcatgtcgtacgtcctgtcccaggagtacgtcttcgagaacgaactggcgctcgacgcgctcgaccccgggctgggcctgcccatccccgaggacgtcgaaccgatcctgtcggagcgggaccgcaccgcgatcaccttcgaccaggcgctcgcccgtgggttgctgcccgactaccggacctgcctggagatcgagtccggcttccgggcctgatccgcccgcgtcgggccgacgccgcccggggcctcggggccgctgtcgtcgcgggcgagcgccgcgacggtgcggtccagcgcgaggcgcaacggcacccggggcgcccacccggtgaccgcctggaaggccgaggcgtcaacgaccatgtcgtggaagtcgctgacccgggcctcgtcgggcgggggcacggccagcaccggcaccggtggccgaccggtccgctcggccaccagggcggcgatggcgcggaacaggtccccgagccgttcaccccggccgtcgccgagcggccagtgccggccggtcagcgccccggggtggtccagcgccgccacgaaggcggcggcggcgtcggccacgtacagcagttgccgttgcacccggccgtcgtgccacatggtcagtggcgctccggacagcgcccggcggatcatcgtggacaccacgccccggtcgggcccggcgcccggcggcaccgggccgaacacggtgggcagtcgcagcgacaccccgttcacgacgccggccccggtggccgccacgaccagcgactccgcggcctgcttctgccggtcgtacggggtggcggggtggtccggctcggtgccgtcgatcgggatccggggcggccggcccacctgggaggcggagccggcgaagaccagtgtggtgggcgtgccgcccggcccggggcggagcatcccgacgagttcccgggtcagctcgacgttgacccgcgcgctgcggtcgtcgtcggcgccccgccagccggaactgtccagggtgaggttgaccacggccgtcgcgtcgcgtaccgccgccgccagggctccccggtcggtcaggtcggcccgtaccacctcaaacgccgcgcggcccggcgcggcgggcagcacggcagcccggcgggcgacggcccggacggtgaccgcccggtcggcgagcgcggccagcacagcggtgccgaccaggccggaggcgccgaggacggcgacgacgggccggtcggcgggctcgcccgctcggccggtcacctcaatcccgcccgggtgccggggccgcctcgccggcccggtagagcgcctgccagtagtagctccacgggatcgtccggctctccgccacgcaggcccagcccggccccggccggtacgcgtcgaggaacgcccgggactgccgccgcacggcctggttgtcgtggatgtcgatgacgtcgcgcagcaggccggtgctcagcgcaaggttgaccacggcctcgccctggaagtgcccgtccaggctcttgtcgaggtacttcccgacggggttgttgacgtacaggtggcgggccctggtggcgacgaaggcgaggtacgcgcgcaccgtctccgccgtcatctccgcgaacgagtcgatgttgatcacgaggtcgtagcgcagctcgctcagcggcccgtccacctcgccgacgccgtggaagtggaccctcgccaactgctcggcggtgagcaccgtgcccaggtagcggcgggccagagcgagggagttcggcaggtcgaccacgtggtacgcggcgacgtcgtggttggagagcacggcgtgacaggtgcggccgtagcccgcgccgatctccagcaccgtcgcgccgtccagtggcacgtggcgggagaagaactccagctccagcaccgcctggagatagtccatgcagatccggtcgccgtcccagacgacggagatggggtcgccgacgtcccggttggcgatccggcgcaaccgggcccggttcgcctcgcccaggttctcggccaggttgaagatgagcgtcttcaggtagcggaccccgctgacccggggatcccagagggcgagcttgtagttgacgtcgctcgacttgaaggaggtgaggtcgtccgccgcctcctcggtcacctgtgtgctgttgtaccgttcccacagcgcactgcggccgtacttgtcgctcatccgctccccgccgatcagctcgatcgctcgtcgaccggtcgtccggcgccggcccgtggtgggttcaggcacaccgtaccggctgccgcccggccgcccggcggctcgacggatgctctagcagttctgctagtaccacggccgaggcacccgcgcggtactaggctcccccatcgagatcggccactccccggctccggggagcaccggccgcacgacggggtggccggcgaccaccaccgcaggggagggcagcgtggagtaccgacagttgggccggtgtggactgcgggtgtccaaggtgtccctgggggcgttcaacttcggcggcccgaccgggccggaggaggccgccaggatcgtcgccacggccgtcgaagcgggagtcaacctcgtcgacacggccaacgtctaccaggacggccgcagcgaggagatcgtcggcgcggccgtgcggagctgccgggacgacgtcctgctggccaccaagatcttcaatccggtcggcccgggaccgaacgaccggggcacctcggcgtacgccctgaagcgggagtgcgagcggtcgttgcgccggctgggtaccgaccacatcgacctgctctacctgcaccgtcacgacccggacactccggtggaggagacggtgtccgccctcgacgacctggtccgctcgggcaaggtccgctacgtgggcacctccaccgtgcccacggcatacgagctggccgaccagccccggctgggcacggtgcccagctggcggatcgtcgacctgctgcgcacggcgcagtcccggggcgccgccccggtggtggccgagcagtcgccgtacaacctgctggaacgcgagatcgagcgggacgtgctgccgctgtgcgcggagtacggcctcggcctgttcacctacagcccgctggcgatgggtctgctctccgaccggttcgccgacggcgagccgccccgcgacgcccggttcaccgcctggtacgccccatcgggcccgcactggcagccggtgtggcggaccctgggccggttggcgaaggtggccgtcgagctgggcctgtccctgccggacctggcgcacgcctgggtctacgacgcgccgggggtgaccagcacggtcgtcggcccccgcacgctggaccaggcccgggcggcgctggcggcggccgaccggccgctgccggaggaggcccgcgcccggctcgacggcatcgccgcacccggggagagccgatggttgcgggtggtggagcggggggtgcggcgctctcgcggtggcccggacgatgctgaggaaaacgttagtccctgacggtggcggcttgtctaccattcaacctggcgaatcttgacgaggcgcgtcgcccggtccggtcagcgcgggtgcgaccgtctcgctccgcctcggcgggaaccggcgggaaggagtgcgatgagcgcccaggtcctcagcgacgagcaggtcgagcggttcgtctccgacgggttcgtgaagttggaggcggcgttcccggccgagctcgcgcagcagggtcgcgaactgctgtggcggcaactcggcatggaccccgaggaccggagcacctggtcccgcgaggtggtccggctgggcctccaggacgccgagcccttcgtgcgcagcgccaccacgccccggctgcacgccgccttcgaccagctcgtcggggtggggcgctggaagccgttggaccggatcggcaccttcccggtccggttcccggtgcccaagcgcccggagcagaccgaggactacggctggcacatcgacgccagtttcctggccgacgacgcgcagcggctgggcccccagaactgggagggcgagctggacctggtcccgcccaactacgcggaggtcttccgctgcaacctccggtcgcgggggcgggccctgctgctgctgttcctcttctccgacaccgacgagcgggaggcgccgacgctggtcagggtcggctcccacctggacgtgccgccgctgctcgaaccgtacggcccggagggcacctacctcgacgtgggcgacgtcggccgggaccgcccgctcgcctccgccaccggacgcgccggtgacgtctacctgtgccacccgttcctggtgcacaccccggtggccaacaccggcacgcggccccggttcatggcccagccgagcctgcagccggtgggcgagctggacctggaccgcccggacggcgactactcgccggtcgaacgggccgtgcgcatcgggctgggcctgccggccgccgagccggtccgatgaccgtcccggacacggacgagcgggccacgacgaccgacgagcccagcgcccgccgggcgcagaccggcgcggacgccgcctggccggagctgatgcggttggtgttcggcgggatggccagccggctggtcggctactgcgtccggctggggctgcccgacgcgatcggcgacgacgagcgcaccccgcaggagttggcgctgcggtacgacgcccgagcggacaccatgttccgggtgctgcgcgccctggccgcgctgcgggtgctcaccgagaccacacccggccggttcgcgctcgccccgatgggggcgctgctgcgtggggaccgacccggcacgctgcgcccgctggcccggatgctgaccgacccggccatgaccacggcctgggacggcctggcgcacagcgtccgcaccggcgagccggccttcgacggcatcttcggcaccgacttcttcagctacgtgggcgggcgacccgacctttccgagctgtacaacgcggcgatgagccaggtgacccacagcgtcgcggcggccgttgccgagcgtaccgacctggccggcgtgcggacggtggtcgacgtgggcggcggagacggcaccctgctggccgccgtgctcgccgcgaaccccggcgtgcggggcgtgctctacgacagcgccagcggcagcgcggaggcggcggggaacctgcgccgcgccggggtcggcgaccggtgccggatcgaggtgggtgacttcttcgagagggtccccgccgacgccgacctctacctgctcaaaagtgtgatccacggttggggcgacggccgggcgacgggaatcctccggcactgtgccgaggcggtcgccccgggcggccggatcgtcatgatcgaccacgtgctgccggacgtggtcggcccggcggccaacgcgctggcgtacctgaccgacgtggggatgctggtcaacgggcagggcctggagcggacccgaggcgacctggaacggctgtgcggcaaggcggggctgtccctggaggacgtcacgccgctgcctcccaccgacttccactggatcgagtcccggcctgcctgacccggcccggcggtgccggattggtagggtgcgccggggagggcatgtgacttaccggcacgaaaccgtacgcggtgcgtacggcgacctggccagtggcgccgtgttgcgctcggcgccgggcttcccggcgttcccggtgcggctcgcctccgaggtcctgcaaaccgcgctggagttgcgcccgacgtccgccccggccaccgtctgggacccgtgctgcggcagcggctacctgctgacggtgctcgcgctgctgcaccggccgagccttgccgggctgctcgcctccgacgtcgacgaggcggccctcgaccttgctcgggccaacctcggcctgctgaccggcgccgggctcgacacgcgggcccgcgagctggcgcaacgcgccgaggcgttcgacaagccgcactacgcggaggcggccgccgccgcccaccggctgcgcgcccgtctggacgcggcaggcggcccgctgccgtacgcggtgcggcgggccgacgtgttcgaccgcgtggccctcaccgaggccgtcgcgggcatgacccccgacctggtcgtgaccgacctgccgtacggggagcagacgagctggcagggggagcgggccggggagggcctgcccgggatgctgaccagggtcgcttccgtgctgccgccgaccggggtgctcgccgtggtcctacgtggacgcaaggtgccgccggtcggtgaggtccgccctcggcggcggttgcgggtgggcaccagagcggcggccttcttcgtcgcaggcgacctgaccggggtgcccgcgacctga

SEQ ID NO: 280 - DNA, 48221 bp, Micromospora carbonacea aurantiaca
  misc_feature: "n at position 106 is undetermined and represents a or g or t or c
tcaggccgcccgccgccagtagacgctgtactcgtcgatcacctgaagtggttcggtgactccctgggccgcgcggaactcctggaccgccttgcggcaggccggaatgacgtagtcgtcgatcacgacgtatccgcccgggctgactttcgcatacaggttgaccagggcgtccctggtcgactcgtagaggtcgccgtcgagtcgcagcacggcgagttggctgatgggcgcgtgtggcagcgtgtccgagaaccaccccggcaggaaccgcacctggtcgtccaggagcccgtagcgggcgaagttggcttgtacgacctccaccgggatgcccagcacgtcattgcagtggtgcagccccagggcctggtccatcgggtgaccgtcggccccggtgtccgggatcccttcgaacgaatccgccacccacaccgtccggtcccggatcccgtaggcctcgaacaccccacgggccatgatgcacacgccgccgcgccacacgcccgtctcgatgaagtcaccggggacgccgtccgcgatgacctgctccaacagggcgcggatgttcctgatgcgcttcaacccgaccatggtgtgcgccatgctcggccagtccttgccgttctcccggttggtcgccttgaactcccgctcgtgcagccactggttgggcaccggcgggtcctcgtagatcaggttcgtgacgaccttttcgaggagatcaagatagagacttcggggatgctccatgacggtccttcgcgcattgggatcggctgcggccacggcggagggctcagcggggaggcgggcggcctgcgggggctttcggcatttccccgcattctcggtccaccgaggagttcacggaaccacccgcttgcgcggatccggttccggaccttcgtcctcgctcggatccccggaccggagtgacgcgggcgcatgactcggggccggaatcgtgcaccgccagacgaatcgatgtgcggggcggtggtcccggccgcagatcgagcgaacgtctgtactcatctggcatatgatcgcacgcccttcgtcagggaattccctagtgttcggcgcggttgcgggctcgccgatgtcatggaaaacactagacaagtgattcccgacgccgggtgggccggcgtggcgccgagcgcggtcgcggcggccagggacaccggagccccgccccgaatccgccggccagggccctcgccgcgcggcaggacctcggtcgatccgtcggtcggaccgccgcccgctgcccctacccgccaggaaggtgcaccctgttctgctgtgggccaaggtctcgacgcccgccgccttgcgaatccgctgcccccttcttttcctgccctcgatcaatcgaggttcatcgacatgaaaggggctaggattccgccagtgccgaccgggccccgtcgccggatgcccgagccgcgccgaacgaactgaccggtctggcggacgccgcacgacgatgggcccgttcaccgatcgtgcgcgatggaggattgatgatcgcgagcgccgcacccgtggctcccctggcttcacatcaattgttgttgtttcttctcgaggtcggggtcctgttgctgctggccgtcattctgggccggttggcgcagcgtttcggcctgccggcggtcgtcggcgagttgctgaccgggatcttgctcgggccgtcgttgctgggccagttggcgccctccgtcgggcattggctgctgcccggtgagccgtcgcagatgcacctgctggacgcgctcgggcagttcagcgtcgtgctgctggtcggcgtggccgggctgcacgtcgacctgcgactgatccgacgccgggccggcacggtcgccacggtgaccatgggtggcctcctgctgcccctcgggttgggcgtggccaccggcctgctggtgccggcggcgctgttggcggcgacggaccagcgcgtgatgttcgccttcttcctcggggtggcgatggccgtcagcgccgtgccggtgatcgccaagacgctcaccgacatgcggctgatgcaccgtgacgtcggtcagctcatcctcgccgcagcgtccctggacgacgcgttcgcctggttcatgctgtcgctgatctcgtccatggcggtcagcgccctcaccgtggggaacgtgctggcctcgctgctcaacctcgtcctgttcatcgtcgcggcggcgctgatcggccgcccggtggtcaggcgtgcgatgcggtgggcgaacgcccagatcgacgtggggccagccgtcgccatcgcggtcgtcaccgtcctgctgttctcggcggccggacacgcgctcggccttgaggcgatcttcggcgcattggtggcgggagtcctgctcgggctgcccggaggcgtcgagccggcccggctggcgccgttgcgtaccgtggtgctctccgtgctggcgccgctcttcctggccaccgccgggctccgggtcgacctgcgcgccctcgccgacccggtggtgctcgtggccggtctggtgatcctggtgctcgccgtcctgggcaagttctgcggcgcgtacctggcaggccggctgacgcgccagagccactgggaggcggtcgccctcggggcgggactcaactcacggggcgtcgtggagatcgtcatcgcgatggtcgggctgcgcctgggcatcctcaacaccgccacctacacgatcgtggtgctcgtcgccgtcctcacgtccgtcatggcgccgccgatgctccagcgggcgatgcgccggatcgagcacaatgccgaggaggcgctgcgggaggagaaccaggcgcagttgatcacccgcccggtggtgcggtgaggccgctgcccgggacgccatgctgccccgtgcagcgtgcatcgcctggagggaccgcgctggtacgttcgggcacgcgacgacgcgggcccgagggagagaatggtgacggtgcggttcttggcgcggaccctgcgcggcctggaggaggtcgcggccagggaggtggccgggcgcggctgcggggtcgagcaccagcggcaccgtgaggtgtggttccgcgcgagccgtccggagccgagcctgctcgacctgcgtaccgtggacgacctgttcctcctcgccggggtgaccgaggacgcggaccacacgaaggcggccctggctgccttcacccgcctggcgcgcgacgctccgctgcggcaactgctcgaggtgcggaagacctacggctactccgcccgggccgggacactcgatgtggcggcgtccttcctcggccgccgcaactacaaccggtacgacgtcgaggaggccgtcggccgcaccgcggcggcccggttgggcctgcgcttccactcccgccgcaacggcgaggcgccgcctgagggcagcctctcgctgcgggtcaccgtcgagggcacccaggcggccctggcggtgcggatagccgaccggccgctgcaccggcgctcctacaagacatcctccacgccgggcacgctgcacccgccgttggccgccgcgctggcgtggctggccgggatccgcgccgggatgcgggtggtcgacccgtgctgcggcacgggcacgatcctgctcgagtccggcgggctgagtccgggagccgtcctgctcggcctggatcacgatccggccgcggtccgcgcggctgtggccaacgcgggggcactcgacggggtccgccgtggttcggcaggtgggacgcccggcgtcacctgggcggtaggtgacgccgggcgcctgccactgggcgccgggacggtggaccgcgtggtcagcaatccaccgtgggaccgtcaggtgctggcccgcggtgccctcgcggacgatccggcgcggctcttccgggagatccgccgggtgcttgcagccgacggcctggccgtgttgctgctgcacgagttcgaggaactgaccggggcggtcgccgccgccgggctgggcgtcgacgacgtgcgggtggtcagcctgttcggcacccatccggccatggtgaccctgtccggctgagccgtcagggcacgacctccagctgggccatcatcccgaggtacgagtgctcggggtagtggcagtggtacatgtaccggccgacgaagggcgcgtcgaaggtgacctggaagcggacggagcccttgggcgacacgtacaccgtgtccttgagaccggtgtcctccggagccggcggcccgccgttgcggccgagcacctggaagtgcaccaggtgcaggtggaagggatggtcgaaggggtacggatcggtgtcgccgttgacgatgttccagatctccgtggtgccccgcttgacctggatgtcgacccggttggggtcgaacaccttgccgtcgatgaaggccgtcggcggccggccggacatgtcgaacttcagttccacggtccgctccaccgtcggcgtgcccagcggcggcagctcgcgcaggcggtccggcacgcgactggtgtcgatgaccctggtggaccccacgtcgaagcgcaggatcgggttgtcgccgtcgaacaggtagacggggccgcgtccgcggtgttcggcgaagtcgatcacgatctcgacccgttcaccggaggagaccgccagctcggtgtgggtggtgggagcgggaagcaggccgctgtccgaggcgatccggaccatcgtctggccgccgaggttgagccggaagacgtgcttgagggccgcattgagcagccggaaccggtagcggcggggagccacctggaagtacggctgaaccttgccgttggccaggatcgtcgtgcggtcgtcggggttgccgaagacgaacgcaccggattcgtcgaactgcgcgttgcgcagcaggatcgggacgtcgtagcgccccttgggcaggtgcaggtgccgctcggcggggtcctcgatgaggtagaagccgtgcaggccgcggtagacgtggtcggcctcgtagtcgtgggtgtggtcgtggtaccacagcgtggccccgcgttggacgttcgggtagtcgtagacccgcgagccgcccggctcgatgatgtccatcgggtgcccgtcactgctggccggcacgcggccaccgtgcaggtgcacgttcgtgtggctgtccagcccgttggtgtaggtgatccggacggggcggttggtccgcgcccggatcgtcgggccgacgaacgagccgccgtaggtgtaggccggggtggacagtcccggcaggatctggacctgggccggctcgatcgggatctcgtagacgtcgacgccgccggcctgggagaccgggctcagctgcggtggcaccggcatcggctcggtgaacggggtgaccgtcaccgtggtcgcgccgacctcgctgactgccggcagcaggtgattcgcgtgcgggctcaccggcgctgcctcagcggtcggtgaacccttgaacaccaggcgggccgccacgccggtggcggtggcggttccgagggcgagtagctgtcgtcggttgaacatggctgggcaccttagtcaatgtgacggggcaggggacgcgtgccggatctggaaaggcgcaccgcacgcggtcgatgcacgcggcccacctgccatggcggcctttcgaggcggcggggtgagtctggcacgaaacatcccgctgatcgaaccgtcagcgggaagtcgaaccgggttcgtcgaattctagtcagtttcccactcttcgcgctctgccggcggcgccggcacccgcgatcctcggcccctgtcctggcggatccgcggttgtgggggaaaccctagtcagttgtcaggcacggctcgatagggtcggatcaggcgagcccaaggtcaatgtccgcgccttcggcgggcccggggtcaggtcgtgcgccgcggacgtggcgaggcttgacattctcggccgaaaggcgaacctgccgacgctgacagcgcggaagtccgcgatttcgccgcaacccgaaggggcaggctcagcccatgaccatggtggtacggcacccggccgagcgggtcgagtgcagcccgatcgcccctcggcgcgacgccgctggcgtgacgccggtcccgctcaccccgagcgctgcgcgtccccggtccgaccggacaccgccggtccaccgtgggcaggagccccggcggtgatcggcttgctgggccggctcccgggggtgaacgccgtgctcggggccgtctcgaagcagcaggccgagccgaccctcgacgaggtgatggccgaacgtttccgcgaacggacggatccgcgccggggcgactgggcctacgcgcacttcatcgatctgcgcgacgcgctcgccgaggtgctgggcgacgcttccggcaactggctcgactacggcgcgggcacgtcgccgtaccggaacctgttcaccgcggccgatctgaagacggccgacattcccggcggcgagtcctacccggccgactacgcgctcgaccacgacggacgctgtccggcacccgacgcgacgttcgacggcgtgctgtccacccaggtcctcgagcacgtgaccgacgcggacgcctacctgcgtgaggcgctgcggctgttgcggcccgggggccggctggtgctgtccacccacggcgtgtgggaggagcacggcggtcaggacctctggcggtggacggcggacggcctggcccggcaggccgaactggccgggttcgccgtcgaccgggtgctgaagctgacctgcgggccgcgaggactgctgctcctgctgcgctggtacggacgcgagaacggctggcccgcgatcggcccggtcgggttggtgctgcgctccctgtggttggtggaccacctgctacccagctccctggacacgtatctggatcgcgcattcggcgatctcgggagacgcgagggcccggacgcgccgttctatctggaccttctgctcgtcgcccggaaaccccacacgaaggagaccgctacgtgagtcggaccgcatcagcgtatgacgagagcgtggtacgacaggtgaacgcgcggacggactgccgggtctgcggcggcacgctccgtacgatcctcgacctcggcgaccagtatctgcaggggtccttcgtcaagcccgggacacccgagccgccggcggtcaagttcccgctcgaactcacccgctgcgtcggcgactgcggcctcgtgcagctgcggcacaccctgccccccggtctgctgtacgacacctactggtaccgctcgcgcatcaacgacaccatgcggacgcacctcagggagatcgccgaatccggggtggcggcactcggccggccgctccggcgggccctggacatcggttgcaacgacggcaccctgctgcagaacctgcgcggggccgaactgtgggggatcgacccgtcgaacgcgaccgacgacgcgcccgagggcatcaccctggtccgggacttcttccccagcccggcgctggacgagcacgccgggacgttcgacgtcgtcacgtcgatcgcgatgttctacgacgtcgaggacccggtggcgttcgcccgcgcggtggagcggatgctcgctcccggtggcgtctgggtggtcgaggtcgcctacctgcgcgagatgctggcgaccaccgggtacgacagcatctgccacgaacacctgtcgtactactcgctctccaccctgaccttcatcctgcgtcaggccgggctcgagatcaggcgggcaagcgtcaacgggatgaacggcggctcgatctgctgcgtcgtcacccgggccaccgagggcgccgaccacgccgacgggtcggtggcggaactcgccgcgcaggagcgcgagctgggactggaccagagcgagccgtacgagcggttcgccgacaacgtgcgggcgcaccgcgacgaactcgtcaagatgctgcatggtctgcgcgacagcggaagcaccgtgcacgtctacggcgcctccaccaagggcaacaccctcctgcagtactgcgggatcgaccgcacgctgatcccgtacgccgccgagcgcaacccggacaaggtcggcgcgcggaccctcggtacggacatcgagatcatcagcgaggccgactcgcgggcccgccgcccggaccactacctggtgctgccgtggcacttccacgacgagatcgtggcgcgcgaggcggccacggtggcggccggaaccaagctgatcttcccgctgcccagcctgcgggtcgtgcaggcgtcgcggaccgactcgcgggtggggtcgtgaccggctcgctcgtccagcggctgctcgccgcggcggacgctcccgacccgggcgtgcacctcgcggccgaggatccggaagcagtggtggccgtggccatggcggaggtggcgggccggaccgtcctctacccgggcccggcgacgccgctgaccgtacagatcgacgtggacgtcgctgacgcgcgacagatctcctacctcctggcggccggtccgcacgggggccaggcgcggccgggccggaccgacgacccgtgggtgcgagtccggtacgacctggcggcgctggtgcgggacgtgttcgggccggccggcccgtggaccggtaccggccgggacgtggtgatgaaggacgagcccggcccggtggagtacaagcccgacgacccgtggctggtacggcgggaagaggcgacccgcgcggcctaccaggctctccgcgcgtgcgagccgtaccgtggcgacctggccgcgctggcgctgcggttcggctcggacaagtggggcgggcactggtacacctcccactacgagcggcacctcggcgggttccgggaccaccggctgaacctgctggagatcggcatcggcggctaccacgagccggacgccggcggggcctcgttgcgcatgtggaagcactacttccaccgcggcagcgtgtacgggctcgacgtgtacgacaagtcgctgctggacgagccacggctcaccacgctccgtggtgaccaggccgacccggcgatgctcgccgacctcgcgcggcggcacggccccttcgacatcgtgatcgacgacggcagccacgtcagcagccacgtcatcaccgcgttccaggcgctcttcccccacgtgcgccccggcggcgtgtacgtgatcgaggacctgcacacctcgtactggccggagtggggtggaaacggcaccgacctgtccgaccccgccacgtcggtcggcttcctcaagacactcgtcgacggtctgcaccaccgcgatcgcctccacgacggtccgtaccagccgacgtacccggacctgaccgtgacggggctgcatctctaccacaatctcgcgttcgtcgagaagggccgtaacaccgaacaggccaacgccacgtggcggccgcggaacgacccgatgcgcgatctgccgaaaccgcagcggtcagcgggggagtgaggactcatgcgtgtcgtgttggtgacgatggcactgcgggtgccgacggatccgagccactggatcacggtcccgccgcagggctatgccggcatccactggatcgtggcgaaccacatggacggcctgctcgaactcggccacgaggtgttcctgctcggcgcgccgggcacgacgccggtcgcaccggcggtcaccgtggtggacgcgggcgagatcgaggacatgcacgcctggctgaacggccctgaggcggccacgatcgacgtcgtccacgacttctcctgcgggcagatcgatcccgaccggcttccccggggcatggcgtacctgtccacccaccacctgaccggcaagccgaagtatccgcgcaactgtgtgtacgcctcgtatgcccaacgggcccaggcggagaacgacgtcgcgccggtggtccgcatctcggtgaaccaggcgcgctacccgttccgggccgacaaggacgactacctgctctacctcggtcggatctcggaatggaagggcacctacgaggcggccgccttcgccagcgccgccgggcgtcgcctcgtcgtggcgggcccgtcctgggaagaggactacctggcccggatcctgcgcgacttcggggacagcgtcgaccttgtcggcgaggtggggggcgaccggcggctcgacctgatctcccgcgcgaccgcgatgatggtcctgtcgcagagcaccatggggccgtggggcgtggtgtggtgtgagcccggatcgaccgtggtgtcggaggccgcggcgtgcgggacgcccgtcatcggcacgccgaacggatgcctggccgagatcgtgcccgcggtcggaacggtcgtgcccgagggcgcggacttcaccgtcgaacaggcccggagcgtcgtggcggcgctgcccgggccggacgcggtccgggcggcggcgctggagcggtgggaccacgtcgtggtggccaaggagttcgaggccatctaccacgacgtgctcgccggtcgtacctggacgtgacatccggctctcccagtcggtgggacgacgccagccggcggcgacgcacctgccagtcggccggcaccgagtacccgtgatgtccctccgggcccactgacgaatggagttcatcgtgaagatcgaggtcctgcagccgagctgcaacctggacaccgtccgggacggccggggcggcatcttcacctgggtgccaccagagccgatcctggagttcaacctcatcaccatgcaccccggcaaggtccgtgggctgcactaccacccgcacttcgtggaatacctgctgttcgtcgacggggagggggtgctggtgaccaaggacgatccggacgaccccgactgcccggaggagttcatccacgtcgcccgggggacgtgtacgcgcacgccctccggagtgatgcacgcggtctactcgatcacgtcgctgtccttcgtggccatgttgacccgaccgtgggacgagtgtgatccgcccatcgtccaggtgcagccgctgccgcacaccctcgcggcgaacggctgagcgcccgagcggggcgacccgctggtgaaccgttgacgatggccggaggcgcaggtcaccggctttccaccgggtcgccttccagcgcgtggcgccagagcgccccgatcgcctcggacagcgtccgccgcggcgtccagccgagcagctcacgcgccggccgcaggtcgacccgggtccagtcctcggcgcctgcggccggcgccggcagttcgaccacggtggccggcacctggctgatgtcgacgagcatggcgaccagcgtgcgcacggacaccgactcgccccggccgatggcgatgggaacggtcgtgccgggcacccggatcgcggcccggatcgcctcggcgacgtcgcgcacgtccacgtagtcgcggcgggcgtccagcgcggtcagctcgatgttcgcgtgcccgccacgacgtgccgcctcgaccagactgccggccaccaggccgagcaggctggccggcggcacaccggggccggtgacgttggccaggcgcaaaaccaccgggtccacggtcccctgcgccgcggcctccagcacggcctcggtcgcggcgagcttgaaccggtcgtactcgctggcgggtcgggacgaccgctgggcggccccgggcgcgtccggtgcggcgagcccacactcgagcaccgatccgaggtgcacgaaccgtggcaccaacgaggtcatcgccagcgccgtcaggatggcctcggtcgccccgacgcaactcgcctcaaggccccgtccggtcagaccccacttgccgcccgtggcgttgacgatcgccgccgggcgctcggcggccagcatcgcggccagctccccgggccgtacccccgagacgtcgatcgcccggaaccggtacccggtcgtggccctgggcgcgtttctcgccacgacgagcacgtcgtgccccgcggccacgaggttcttcgcgacctggcgccccaggaagccggtgcctccgaacacgatgacgcggttgtcgctcactcgtacctcctggacgacgactcgaccggttggcggacggtcaatcgggacagagctcgatccagtggaagcccgtggacggcagcgacccgacctcggcgatccgcagacccgccttggcgcagaggccggcgaagtcgtccctcgtccgctccatcccctgaccgttgacgagcaggcccaggtcggtgaggtaggtggtggggctctgcccgggcagcacggtgtccggcatcaggtggtcgacgagcaggatgcgtccctgttccctggcggcgcgggcacagttgcgcaggatcaccgcggcatgctcgtcgtcccagccgtggatcacgctcttgagcaggtacaggtcgccatcgcgcggcacctccgagaagaagtctcccgtttcgatccggcagcgggccgtcagacctgccgcttccagggtctgctcggccgcgtgcacaccggacgggctgtcgaagagcaccccgcccagccgggggtgctcggccaggatctcgacgagcgacgtcccgtcgccaccgccgacatcgacgaccgtccggaaacggccgaagtcgtacgcgccggccagcaccctggcgactccccgggtgccctgactcatcgcggcgttgtacagctcggacagctccggatgggacgacaggtagccgaagaagtcgatcccgaacgcctcgtcgaaggccgggccgccggtgcgcaggctgaactcgaggttctgccaggcgctcgtcatcgtcggatcggtcagcatccgggccagcgggtacatcgatcccggccggtcgctgcggaacagcgcgcccacgggggtgacggtgaaccggccggggcggggttcggcgagcaggtcgagcgcggcgagcgcacgcagcagccgcagcatcggaccctcctggaagccgtactcggcggcgacacctgccgctgtccgttcctcgtcgccgatcgcgtcgggcagccgcagccggaccgcgagcgcgaccacgtgcgtcgccatcccgccgaacaccagccgcagcactgccggccacggggagctcgcagggctatccacgggcgagtcccgcccggatcgcccgctcgaccgggacgtactgcccgtcggcgcggtccaggtcgaactcgccggtcggttgcagcgagggctgggccatgaaccgggggctggtgccggtgttggtgatcggcgtgtgcaccaggaacggatggcagaggtaggcgtcgcccgcccgcccggtggccatcgcgagggggcggtccgcgcccacgtcgcggcaggcgaggtaggtcccctcggcgccgtagggcgccagcaggggcggcacgtccaggtgcgaaccgacccggatcagcgtgggcgcgtcacgctcgccggtgtcggagtagaggagcagcaccagcagggcccggccacgcgaaaccaggttgctgcggaagatccggtcgtagtccggcggcacgagcgggagctcgccctcccagtcctggccgctgctcatggcggccacgccctcggggctgaggaagctggcgtcgatgtgccagccgtagtcctcggcctgttccggatcccggtccaccgggaaacggatcgggaacgtcccgaccatgtccagcggtcgccaccggcccgcaccgacgagctggtcgtacgcctcgaccaacgccggggtgttggcgctctgcacgaacgcgtcgtcgccccgcagaccgagccggacgacctccctggtccaggtcgagctgtcgtcgggatccacgtcgagttgcttccagagcagattgcggcactcggcggcgagcgcggcggggaaagcgttcggcacccggacgaagccgtcggcgacgaagctctcgatctgctcggctgtcagcatgcgcccctcctcatgaaactcccctgccggaccggttatatcctgacggcgccgacggtaggcagttcctgcggaagactagcgattccaccagaggtgcggtcacgcccgttgtcgggtgatctcgtacagcgtgatcgaggcggcgaccgtcgcgttcagcgaactcgccgacccgaccatggggatccggagcaccacgtcgcagttgttggcccagaaactgctcattccgcttgtctcgttgccgacgacgacggcggtcggcccggtgaagtcgtgattccagatgtcggtgaccgcgtcctcactcgtgccgacgagcgtcatcgcgtcgatcgtccgcagccattccagcacggcggtcggggtctcggcccgcaccgccggaacggcgaacagcgagccgcggctgccccgaaccgtcttcgggtcgtagaggtcggccgcccggcccgcgacgatcaccccgtcgatgcccagcgcgtcggccgagcgcaggagcgagcccacgttgcccggactgatcggacggtcgagcaccaccagaacgccgttcgggcgtacgcggatccgggtgaggtcgtccggagggatcgcgacgacggcgatcagctcggtggtgtcctcgtcctttcccgcgagctcgtgcagcagctccggggacagccggatcacctcgtcggcgacctgctccctgaccaggtcacgcgcccactgcgatctcaggttccccgcgtgcagcagcgcccggatccgccagtggtgcgcgatcgcctcgttgatcgggcgtacgccctgcaccaggaactcacccagccggtgccgcgtgttccggttggtcagcagcgcctcccactgctggaatctggcgttgcgccgctccagccgggcctccacgccacgcctccgcggcccttctccgatcttggacatggctgagacccttcccacgaacccggcttgcgtgccctgcggcgggacaatcatgccggtcgtccgcacgggccggcgggccggggacaagtgtcggcgtcggctggggtggcacccgccgtgttctcggcggcggccccgagcccgatgccggcgaacgcatcgtgctccgtcggcgggaaataccacacgaagatccgttccacatctaggtggaattccagactagttgcgatgcggccatcatagagtcgtggtccggtggacgaaggccggggcggctccgagctgcggtgatgatcaacatgaattgcgaggaggagaattcatgcggacaccggacatgttcatcggcggtgtcgggacgttcattccgccgcgggtgagcgtcgactgggcggtcgcccggggcctctattcggccgaggacgccgaggcgcacgaactcgtcggcgtcgcggtcgcgggcgacatgcctccccccgagatggcactccgggccgcacagcaggcggtcaagcggtggggcgggtcgccgaaggagttcgacctgctgctgtacgccagcacgtggcaccagggaccggacggctggccgccgcagtcgtacctgcaacggcatctggtgggcggcgacctgctcgccctggagatccggcagggctgcaacggtctgttcagcgcgatggaactcgccgccagctacctgaccgccgttccggaacgcacgagcgccctgctcgtcgcggcggacaactacggcacgccgctgatcgaccgctggtcgatgggacccggcttcatcggtggcgacgccgcctcggccatcgtgctgaccaaacaaccggggttcgcccggctgcgttcggtgtgcacacggacgatgacgaccgccgaagccctgcaccgcggcgacgagccgctgttcccgcccagcatcacggtcggccgcaccacggacttcagcgcccggatcggccagcagttcgccagccgcagcccggcggccgcagccatggccgacgtgccgcagcgggtcgtcgagctggtcgaccaggcgctggcggaggccgagatcgggatcggcgacatcgcccgggtggggttcatgaactactcccgcgaggtggtcgagcagcgggtgatgacgatgtgggacctgccgatgtcgcgttcgacctgggagtacggtcgcgggatcgggcactgcggcgccagcgacaccatcctgtccttcgatcacctggtgcgcacgggggagctccggccgggcgaccacatgttgatgctgggcaccgcacccggcgtcgtgctgtcctgtgtcatcgtccaggtcctcgaatcgccggcctggacgaagtgacgccgggcaggcgggggacccccgccccggcgtcgggtctgcggcggtggcccggaccacgacggccgacggccgtgggcccgctccgcccgttccggaggccggagcgtccaggtgcccgccggcacctggacgctcacaccgagggcgggtggtccacgtcgcctacttctggtcgcggcgcaggatcaggtagcagaccccgtcctcgttgacgaactcgtccagcagcggcgtcaggccggcctcgacggccaacgaggagatcacgtcgatgccgtggaaggagaggaaacccttgaactcgaccgggttcgccgtcaggtaccgctccgcgtagaagtggaagaagctgcgcgtcgacgcgccgatgtcgaggaagttgaccccgaacctgccgccgggccgcaggatccgggcgatctgacggaagtagtggaagaactcgaagacgttgaggtgaatgaacacgttcagcgaaaagcccgcgtcgaactccgccgacggcaacgccgccaggtagtcgttgtcgatgtggtggtagtcgacgttggcatggtcctggcaggtgacccgtgccttgtccaggaaggaccggctgacgtcggtgcacagcatccgtcgcaccgaaggcgcgaggacgttggccatgatcccctcgccgctgccgatctcgaagatcgacgactccggggtgatcccgaggcgctcggccatccacttcgcccggtcgacgcggtcctgcaggtactcgtcgcggggctgggtgccggcgagctggatctgcatctcgtccggcgtcctccactcccagaccatgttgaggtcgcccatgctccgcagcggcggcttggggccggtggcgggtgttccttgcgcgttgctcatcagacctcgctcacggtgtcctgggtgatttccttacgttgcggccctcgcccggtcaccaacccggcgacgtcggaggcggtcagctcaccctcgcgggccagggtgacgagcaggtcggcgacctgcgcggcggtcggcgcggcaccgacggactcgctgagctcgaccgcccggcgccggtaccggtggtcgaacagcacctcaccgatggccttgtcgatcgcgtcgcggtcgatcagcagcccgggcaacgtcttggtcgctccctgcggatccagccgccgaccgtagatctgcccgtcgaagttcagcgcgagtgacagctgcggcacccccatggcgatgccgttcatcaggcagttcgcgctgccgtggtggatgagcaggtcgcagtcgggcaggatcagttcgagtgggcagttgcgcaggacccggacgttcggtggcagcgtgcccatcgcgtccacctcggacagcgccgccgtgagcaccacctcggtggccagttgcgccgcggtctcgaccgcctgtcgaagggccggcagccgctcgccgaacacccccgtcgcggagttgccccacaccacgcacacccgcttgcccttgaccgggcccaacagccaggggtcgacgtcctgagatccgttgaaggggtggtatcggatgggtatccgcagcgcgtcgcccatgggcggaatggccacgtccggcgacggatcgacggcgtacttgatgtcgcgccgggtccactgcacgccgtacttctcgaagcaggagaggggatcccccgccatcatgttgagccccggctcggtctccaccgtgccgatgaagcccggcccgaagaagacgctgggcacgtcgttcaaaatgccgaccagcgccccctcgaccgccatgatgtcgtacaccaccaggtcgggacgccaggacgcggcgtagtcgacggcgttgtcgaagctgcgctggaccgcggcgatggacctcttccagaagtcgctcagcatgccggtgtcgaaatcgcgcacggagccgagcgcctcaccggtgaagggatgcagcggcagaggcatctccccgctctgcggcggggtgttgatcgccaacgaccagtaggccagccgggcgctttccatcatgtcggcggagtcgagcatcgacaccggcatcaggccggtcgcctggacccccgaaacctgctggggcgggcaggcgacccggacctcgtgcccggccgcccggaacgcccatgcgagcggaaccatgcacatgtagtgtccagcccagttggacacggtaaacagaatccgcatcggaacctttccctagcgccgtacctgcacgggtcgcttgttcacgtgccgagcccgatcaccacacaagcgcgaatcgaccggcccggcgcgacaggctccgctgcggtcggcggctgcccgaccgagagtagcggacctggactagcgttttccccacacctgatcttcggcggcaaggaaacgcctcgcatatgcatcaaccattcttcgctctgggccaggaactgtcgcggcaccgtacgaaatcgttgcggaggtcgtcgttcaggacaccccgtcgtccaccaggcgggtcggatcgagcgagttcatgaacgaacgcagggcgtcgagatgggtcgcgggcttgtcccagccgagctcggcgcaccaggcgatcaggtccgtcagctcctgggtggcgcgcgccttctcctcggccgacaggctggcgaccgagagatcctgcggccactgcaccacgttggccaggtccacctccagcccctcggtacgcgcgaactcgagcacgttgcgcaggtcccacaggttgtgccgctgcggggacacctggagccagacgtcgaagtcggaccggagcaggcgcagattggccacgaagtccgcccacttcccgccggcccggatgtattcgaacacctcgccgacgccgtcgcaggaagccccgatgcccacgctcttgaagtgccgtaggagctttatcgcgttgtccggggagacggtcaggttcgagttgtactggatgtcgacgttgtgcgcgttcccggtttccacgagcagctcgagcatggcgaaatgacccggttgcaggaagggttcgccgcccgcgaagtacagcttgcggatcaggtgcgcattctcccgcagcgtcgcccacaactcgtcgtcgtcgcggtacgggtcgatgaccgcggacgaccacgacgggcgttgcttggcgccccaggaggaactcaccgggtaggtgcacatgacgcaccgcaggttgcagaggttgccgaacctgatgtcgagaaagaacgggaactcctcgaccgtgccgtccgcggcggtacgggcggcgagcgcatcgaggtcgtactcctggtggaaccggcggttgacgttctgccggtaggactgggcgccgtggtcctcccggaagtagcagtacttgcacgcctccacgcgctcgccaccgagcatcgccagccgggtccgcttcatgttggggctgttgaaggcctcccggatgcccatcacgcggtccgggttgtccttggcgtaccgcgagcccggggagcaaccgatcgcgtcgtcgttcagcgcgaacgccggctcctcctgctcgtcgtacagctccgtgtggtacatcgagtcgtcgacgcagcaccggccgtagacgccgtcgatggaggcgcagaggtggatccacggcagcacacacgcggtctgatcggccgtcggggacggggtggcgtggctgtcgcccggaacgctcatcggatgccccccgagctcaccatcgccagtactcctcgtgcgcgaagcgcagcgtgtcgatctccggccggtccacccagtgccggagcgactcggccggctggtagtcgaacggctcctcgtcgccgaactgcggctcgttcgcccgcatctggatgcaggagcgcaggacctgctgtttcagcccgatgtactccgcgctgtgcgggcccaactgccattccacctcggccggccggtactcgaagtagatgacccggcgctgcttgccgaccaccgcgggcgccccgtgcagcgtgagaatgttgtgcaacaggaggtcccccggctgcatcacggctggcaccgccccggtggtgtcccattcgctcgcgttgagctggtccgcggtggcggtcaaccggtcgtcgccccagtagttcgactccgggatgcaccagacgcagttgtcctcgggggcggggtcgaggtagatcccggcgtcgatgacccggcccgcaccggtgacgccgaccgcgttgtcgtagagcccggcgtcgcggtgccaggccagcctgggcgctccggcgggtgtcttgaagaccatgctgtcccaggtcgggatcagattcggtccgaccaactgctccatgatccgcagcagcaacggatgaccggccagcatggcgatgggtcgggccttgtcgacgacgtactcgatccgcaccggcgcggcgcccggctggtcgggctccaacgtccagaccgtgtcctccatggaccgggtcgaccacgcccggtcgatcagggcccggccggcctcctggacgtcggccagttcctgcggtgtgagcaacccgcggacgaccaggacaccctgccggcgaaaggccgtgacgtgctcgggcagcagccccgtccgccggatgtcgcattccgcgatccggttgacgacacgcaggtctccgacggaactcatcagtccacacccttctgatcagcggtcgcgggcccggcggcgcggtccgcgacgaagtaccagtcctgctccagggccgtggtgagcgcggcgcggctcagcgcccgcccgcccgcgagccacgccggcagggtgaacacctggtaacccagctcctccaccagcagtgaccacaggtcatccgtcgtcgtgccgtactcccgcatgacgttgtcgccgccatgctcgaagacgatcaccggccgaccacgccgcaacgtgtcgcgcgccccccgcagggccagcacctcgcccccctcgatgtcgatcttgatcaggtcgacacgtacgtccgcgggaatgacgtcgtccaggcgcaccgtgtccacggtgatctcgtgcagcgtctccgccggccggtcgtagggacgtcggcgcaggccgctgtagccggggttggacaccacgtgcacgaagctgtgccggcccgcggcgtcggcggctgccgccctgacgaccgtgaccgacggcagccggtctgccaactcgtcggcgagtgcgggcaacggttcgacggcgaagtggttgccctccggcgccacccggaccaggtgctgggtgatctcgccgacgccggcgccgaggtccaccgacacggccgtccggccgcagacccgctcgatgatctcgacggtgagtcggtcgtagtcctcgttgcgctgggcggggtcggccgccagggagccgctcacgccggccgggtccgtccgatgcccagtcgcgggctcgtcatcaggtacaggccggtctccgggtcgaacagctcgagcccgtcgatcttgttcagcccctcgctgaccggcgctttggggacaccggcctccgccatccggcgggcctgctcggcggcgaggaagagctggccgaccgagttgccggcgtcggccgccggtagctgcggcggaaccgagcgaccggccatggcgtcgctcacgtcggcgagcccggcgatcagctgggcgaacgccttggcgccgtcgacccgttcgaactcggcctcgtcgtgctcgccgatcagccggtcggcgagggcgaagtagttcgccttgccggcctgctgctggtagacggccgcgaccagggtgaacaggcgctcgaaggcgttgcggtagagcgtctcgtagaacccgtaggcctgctcctcctcgacgtcgccgttgacgatgcccaggatcgacgccgacgcgagcatgccgctgtagagcgcgaggtgcacgccggtcgacagcagcgggtccaggaagcaggcgctgtcgcccgcggcgaagtagccggggccgcagaagctgtcggacacgtacgagaagtcctgctcgacccggacacccggctggtacgtcccggtcgccaccaggctccgcaccgtcggcgactcctcgacgagcgcggcgagcatgtcctcgagtgagccgtgttcgctgcggcgttcgaggaagcgcttctggtgacacacgaacccgacgctgtagcggttgccccgcagcgggatgacccagtaccagccgtccggcgcgccgatcacgttgatgccaccctgcggcgagttgggcagcagtgatccgccgtcccagtagccccagatggcgacgttcttgaacgtgtcgttcgcccgccggtgcttgaagtggcgggcggggatcatgccggcacggccggaggcgtccacgacgaagtcgaactcggtggtgcgccgctcgccgctgtccggctcggcccactccgcggccaccgcgcggtcgccgtcgaagatcacccgcttgacctcggcgttctggataaccgtcgcgccctgtttggcggcgttgttcagcagcacgtggtcgaagtcgtcgcggtccacctgccaggacctgactccgggaccgaagatctcggtccagtcgatggcccagtcctccttgccccaccgcagcagcacaccgttcttctgggtgtagccgcgggcgtcgacgtcgctcagcgcgccgacgaagtcgacgatggtccggcacgaggacgcgatcgactcgccgatgtggtagcgcgggaaggtctccttctccagcaaggtcaccgacagtcccgcacgcgcgagcagtgccgcggcggtcgatccggccggaccgccaccgataaccaagaccgtgctgaccatgaggctcccaatcgtgaggaggacgggacgtgatccttctattgagaacatcaccgtacggcgtgtccagattggcgttctacgatcactgggaaggtctagtgggagcgctagtgtcatgcgcccgaagtgatctacgatggggctggttgaccgtctggcgtcaacctgatcccagcatgttcggcccgggaacgggttctcgccgaattgctgggcggaaccctcgaattggtcggctgtcggctgcggggggcttggtgtgcgccgcgccgggcactgtcgtccagacattaatgcgcatggagggttcgtgaagatactctttctgccggggccggtgaaatcgaacgtattcggggtgggggccctggccgtcgccgcacgggtgagcggccacgaggtcatcgtcgcgtccaccgtggagggcgccgccgcggcgacgggcatcggcctgcccgccgtgacgacgagtgagctgacgctgacccagcttctgaccaccgatcgcgccgggaacgcgctggagtttcctaccgaccccgccgagttgccgaccttcgtcggccacatgttcggtcgtctcgccgccgtcaacctcggcccgacgcgtgacctcgtcaccggctggcggccggacgtcctggtgagcgggccgcacgcctacgccggcccgctgctggccgccgagttcggcctgccgtgcgcgcggcacctgctcaccgggaccccgatcgaccgggacggcacgcaccccggcgtcgaggacgagctcgagcccgagctgagcgcgctcggcctcgaccgggtgcccgacttcgacctggcgatcgacatcttcccggccagcatccggcccgcgggcggaccggtgcagccgatgcggtggacgcccaccagcgagcagcggcccgtggaaccgtggatggtcacgccgggggaccggcgccgggtgctgctgaccgccggcagcctggtcacgccgacgcacggcatggacctgttgtggaacctcgtgaccgcgctcgcggacctggacgtcgaactggtcgtcgccgccccggaggaggtcggcgcgctggtccggaagatgcccggggtggcgcacgcgggctgggttccgctggacatggtcctgcccacctgcgccctgatcgtgcatcactccggcacgatgaccgcgctcaccgccatgcaggccggtgtcccgcagctgatcatcccgcaggagagccggttcgtggactgggccgggatgctggcgaccaagggcatcgcgatcagcctgccgcccggtgcggacaccgaggacgccctcgcgggtgcggcccgccggctgctgaccgagccggcctacgccacggccgcgcgtgccctggccgacgagatcgccgagatgcccctgccggtcaccgtcgtcgacgtgctgcgggacctgaccgagaaggcgcggtgatctctggggatttcttggaccgtcccgccctacagtcggtgccgaatcccgtccgctctggcgaaaggggagttcatgtgacgaccgagccggatcgatctcgatacctctaccgacagatgcgtctcatccgggagttcgaggagcactgcctcgaaatggccgtcgccgggacgatcgtcggtggtatccacccctacatcggtcaggaggccgtcgcggtgggcgtgagcgcccacctgcgagaggacgacgtcatcaccagcacccaccgtgggcacggccacgtgctcgcgaagggcgccgatccgaagcggaccctggccgagctgtacggcgcgagcacgggcctcaaccgggggcgtggtgggtcgatgcacgccgccgacgtggggctgggcgtctacggcgcgaacgggatcgtgggcgcgggcgcacccatcgcggtgggcgcggcctgggcagcccgacgccagggccgtgaccagcaggtggccgtggcgtacttcggcgatggcgcactcagccagggcgtggtgctcgaggccttcaacctggcggcgttgtggtcgctgccggtgctgttcgtctgcgagaacaacgggtacgccatcagcctgccggtcgaccggggcctggcgggcgacccggtgcgtcgggcggccgggttcggcctgaccgccgaagcggtggacgggatggacgtggaggcggtcaccgaggccgcggggcgggcggtggccgcctgccgtgccggtgggggaccgcacttcctcgagtgcgtcacctaccggttccgtggtcaccacaccgtggaacacctgatgggcatcaactaccgcgacgaggccgaggtggccagctggacggaacgtgacccgctggcgcgccagcgggcgcgtctcgcgccggcggtcgccgacgaggtcgacgcggagatcgccgcgctgatcgccgaagccgtcgcgttcgccggatcgagtcccgggtccgacccgcgcgacgctctggactacctgtacgccggcacggcgccgacgcggccgggagcgtgatccgatgccgagtctgtcctacatcgcagcgttgaaccaggccctgcgcgacgagatggcccgtgacgaacgggtgtgcatcttcggcgaggacgtctgcctgggcctcaccggcatcaccaaggggctggccgaggcgcacgatggccgggtggtggacacgccgctgtccgagcaggcgttcaccagcctggccaccggggccgccatcgccggccagcgtcccgtcgtcgagttccagatcccgtccctgctgtacctggtgttcgagcagatcgccaaccaggcgcacaagttctcgctgatgaccggcggccaggccagcgtcccggtcacctatctggtacccggctccgggtcccggtcgggcatggccgggcagcactccgaccacccgtacagcctgctcgcgcacgtgggggtcaagaccgcggtgccggcgacgcccagcgacgcgtacggcctgctgctgtcggcgatccgggagccggatccggtcgccgtgttcgcgccgaccctgctgatgggcacgtccgaggagatcgacggtgacctcgacgccgtgccgctgggcagtgcccgtacgcaccgggagggcaccgatgtcacggtggtcgccgtgggccatctggtcccggtcgccctccaggtggccgccgacctggccggcgaggcgtcggtcgaggtcatcgacccgcgcacggtctacccggtcgactgggagaccctgggcaagtcgatcagccggaccggtcggctggtggtgatcgacgactcgaaccggatgtgtggtttcggcgccgagatcgcggcgaccgcggcggaggagttcggcttggcggtaccgccgaagcgggtgtcccggcccgacggcgcagtgatcccgtacgccctgaacctggaccacgcgctgctgcccgacgccctcgaactcaccaaggccatccgggccgtgctgcgtcggtagctgctgtgggggtatcggacgcggtgttgaaggagagaggccggcacatgacatcgggacgcccgcgggtggcgaccgtcacggtgaccaccaacgagagcaagtggctgcgtcgctgcctgggggcgcttgtcgacagtgacaccgaaggattcgatcttgacgtgcacctgatcgacaacgcctccaccgacggcagcgcggagctggtcgcgcgggagttcccgagcgtgaagatcacccgtaatcccaccaacctcgggttcgccggcgccaacaacgtcggcatccgggccgcgctcgccgccggcgccgactacgtgttcctggtcaacccggacacctggaccccgccacggctcgtccgggcgatggtcgaattcgccgagcgttggccggagtacggcatcgtcggcccgctgcaataccgctacgacgccgagtcgaccgagctcgtcgagttcaacgactggaccaacacggcactctggctgggcgaacagcacgcgttcgcgggcgacgggatggctcatccctccccggccggcagcccgcaaggccgcgcgccgaggaccctggagcacgcgtacgtccagggcgcggcgctgttcgcgcgggtggcgatgctgcgcgaggtgggcgtgttcgatgaggtgttccacacgtactacgaggaggtggacctgtgccggcgggccagatgggcgggctggcgggtggccctcctgctcgacgagggcctgcaacaccacggcggcggcggtgcggccacgcgcagcgcgtacacccgggtgcacatgcggcgcaaccgttactactacctgctcacggacgtggactggcacccgaccaaggcgacccggctggccgcccggtggctggtggcggacctggtcggccggaccgtggtcggcagggtggacccgatgaccggggcccgggaaaccctggcggcggtgcgctggctggcgggccacgcgccgaccatagcggaacgtcgacgcagtcaccgggcgttgcgcgcgggccgtacgccggcacggcgtgaggtggcgtcgtgaccgggccccgcatcctcatctccggcaacttccactggcaggccgggttcagtcacacggtggagggctacgtccgggccgccggcgcggcgggctgcgaggtccgggtcagcggcccgctgtcgcggatggacgaccaggtgcccgggctcctgcccgtcgagccggacctcggttggggcacccacctggtggtgatgttcgaggcccggcagttcctgacgcccgagcagatcgaactggcgacccgcacgttcccccggtcgcgccgcctggtcgtggacttcgacctgcactgggccgacgagcatccggaactgggcgtggacggcacggcgggcaagtacaccgccgagagctggcgctcgctctacagcgagctgagcgacgtgatgctacagccgaagctcaccgggaagatggccccgggagcggagttcttctcgtgcatcggcatgcccgagaccgtgtgccacccgttgactctcggccggcagcgggactacgacctgcagtacatcggcagcaactggtggcgttgggagccgctgacggccctggtggaggcggcggtgacgctgcgtcccgtgccgcgcatgcgggtctgcggccgtttctgggacggcgccacctctcccgggttcgaggacgcgaccacaagcgtcccgggctggctggcggaacgcggcgtcgagctctgcccgccggtggccttcgggcaggtgatcccggagatgggccggtcgctgatctcaccggtcctggtccgtcccctggtggcgggcacgggcctgctgacgccgcgcatgttcgagaccctggcgtcgggcgccctgccggctctctccgccgacgcggagttcctcgccgaggtctacggcgacgagtgcgcgcccctgctgctcggcgacgatccggccacgacgctcgcccgcctcaccacggacttcgagcggcatgcccggatcgtcggtcggatccaggaccgggtgcgggaggagtacggctacccccgcgtcctgcggaacctgctggccttcttcgggtaggggggcgtggtcgggccggctatccccagtccatccacgggcggggctcggggtcggcgacctcggccggcgcgctcatgaacaccagcacgtacgcgcgccgaggctggtcggtcaggttcgggccggcgtagtgcggggttcggaagtcgtgcaccaccgcgcccccgggcgccagcgggcaggcgaccgcgctggtcgggtcgacgtcgtcggtcatcaggccacggatgcggtcgtcgttgtcgatgtggtggtgcgggagcaccggaccgcggtggccccccggcaggtagtgcaggcagccgctctcgacggtggcctcgtccagggtcgtccagatgctcaacccgcgccgcctccaccggggatccatgtaggcctcgtcctggtgccacggcgtcggagcgccgtatcgcggcggcttcaggatggcgtgcccgtagaactcgagctcttcctcggccatatcgagaaaggctgacgcaattgaccggcaccgcgcgaagtgcgggctatccagcaactccggtacgtatttctccggcttgatgatctgcggcagcagtggcggcccttcgcggtcgcgttggccggcgatatcgtagaagtcctccgcgcccggggtcgcgcgccggacgaaaagccggtcgtaggcctggcgcagccacgccacctccgactcgctcgcgacctgcgggagtatcgcgaacccacgactgcggaactcctcccggtcacggtggtctatggtgcccaccacttccatcgcgtccatgccgtctccttcaagggatgacctcgacagtcacgatatgggtgcggcacccgacagtcatcaccccaggtcaggattagggaacggcctagaatctgcggacaagtcgaatgtcgccccccgttgtgtcagactcgccgtgtcccttttcgagcggaagcagccattcatgacccgacaccacgccgtcctcccgggcggcggcaccacgcgcgccctcctcgcgcgggcgcggcccaccgtgcggacggcccccggcggcggcgcgctccggcacgtgacgtcacgcggtcgacgtgctgtcaccggcgttcgagtggtgttcccgctgccggccgagcgccagggctgaccgtgccgacggcgatcgtggtgggtgccgagggccaggacggggtgttgttgagccggctgttgcgggcccacgactaccgggtggtgccggtgggccggcacggcccggtcgacatcgtccggcccgacgacgtggccgaactggtgaccgagctgcgaccggacgagatctacctgctggcagcggtgcagaactccgcgcaggacccggtcgccgatccggtggagctggcgcaccggtcgtacgccgtcaacacgttggccgtggtgcacttcctggaggccgtcgagcggcacagcccggcgaccagggtgttctacgccgcctcctcacacgtcttcggcaggccggacacgccggtacaggacgagaccacgccgcttcgaccgacctccgtctacggcatcagcaaggcggccggtctgctgcactgtcgttcctaccgggcgcggggggtgttcgcctcggtcggcatcctctacagccacgagtccccgctccgccgccccggcttcgtgtcccgcaagatcgtggacgccgtggtccgcatccagcgcggcgaagcgttccggctcgtgctcggcggcctggcggccgaggtggactggggctacgcgccggactacgtggatgcgatgaggcggattctcggcctggcgacagcggacgactacgtggtcgcctcgggggtgcggcgcaccgtccgcgagttcgcggagaccgccttcgcggcggtcgggctggactggcgcgaccacgtcgaggagaacgccgcggtgctcacccggccgagcgtgccgctggtcggcgacgcgagccggttgcaggccgcgaccggctggcgcccgagcgtcgacttcgccggcatggtgcgggccctgctgcgggcggcgggtgccgacctggtcgggacgggccaggacggatagccgacctgtccgtgcgcgctgcttgttcagcctggtcggctggtccgactcccggcgtcgccgtcgatcgataacggaccctttagtagggaaatcacgggacagacttcggtaccgtcgaagaaccagtcgcctccactgccggagtccatcgtgaaccacgttcctgtcccggtccgaacatccaggatcgactcgtgaaagcgctggtattggcgggtggaatcggctcgcgaatgcgcccgatcacccacacgtcagcgaagcagctcattccggtcgcgaacaaaccggtcctcttctacggcctggaagcaattcgtgacgccgggatccgggaagttggcatcatcgtcggcagcaccgcgccggagatcgagcgggcggtcggtgacggctcgcagttcggcttgaaggtgacctacctgccgcaggacgccccgcgcggtctggggcacgcggtcctgatcgcccgggacttcctcggcgacgacgacttcgtgatgtacctgggcgacaacttcgtcctcggtggcatcaacgacgcggtcgagcggttccgccgggaacgcccgcacgcccagctgatgctgaccaaggtcaaggatccgcacgccttcggcatcgcgacgatgggcccggacggccgggtcgtcgatgtcgaggagaagccccggtatcccaagagcgacctcgctctggtgggcgtgtacgtcttcagcccggtcgtgcacgaggcgatagccgaactgaagccgtcgtggcgcaacgaactggagatcaccgacgccatccagtggctgatcgaccacgacaggcgtatcgaatccaccataatcaccggattctggaaggacaccggcagcctcgcggacatgctggagatgaaccggttcatcctggaaagcctcgactccgaggtgagtggcgaggtcagtgcggacaccgagatcaccggtcgggtcgtgatcgggcccggggcggtcatcaccgggtcgcggatcatcgggcccgtcgtggtcggggccggctcgatcattcgcaactcgcagctcggcccgttcacgtcgatcgactgcgactgcaccgtcatcgacagcgagatcgagcagtccatcgtgctccgcggcgccttcatcgacggcatcggccggatcgagtggtcgatgatcggccgtgaggcgcgcctgaccccgggcccgcgcgcgccgaagacgtaccgcttcgtcctcggcgaccacagtgaagtacgggtaggcgtgtagtgccgagggtcttcgtggccggtggcgccggcttcatcggctcgcactacgtgcgggaactcgtcgccggggcgtacgccgggtggcagggctgcgaggtcacggtgctcgacagcctcacctatgcgggaaacctcgcgaatctcgccggggtgcgggacgccgtcaccttcgtccgcggtgacatctgcgacggccgactgctcgccgaggtcctgcccggccacgacgtggtgctgaacttcgcggccgagacccacgtcgaccggtccatcgccgactcggcggagttcctgcggaccaacgttcagggcgtccagtcgctcatgcaggcgtgcctgaccgccggagtgccgaccatcgtccaggtctccaccgacgaggtgtacggcagcatcgaggccggatcctggagcgaggacgcgccgctggcgccgaactcgccgtacgccgcggccaaggcgggcggtgacctgatcgccctggcgtacgcgcggacgtacggactgccggtccgcatcaccaggtgcggcaacaactacggtccataccagttcccggagaaggtgatccccctcttcctcacccgtctgatggacggtcggtcggtcccgctctacggcgacgggcgcaacgtccgcgactggatccacgtggccgaccactgccgtggcatccagacggtggtcgaacgcggtgcgtccggcgaggtctaccacatcgccgggacggccgagctgaccaacctggaactcacccagcacctgctggacgcggtcggcggaagctgggacgccgtcgagagggtgcccgaccgtaagggccacgaccgccgctactcgctttccgacgcgaagctccgggccctgggctacgccccgcgcgtccccttcgccgacggcctggccgagacggtcgcgtggtaccgcgcgaaccggcactggtgggagccgctgcggaaacaactcgacgccgtcccgcacgactgacggtgcggcaccgcgattgtccatgttctcagccaaccttcgaaggagcccggtatggctcactgcctggtcacgggtggcgccggtttcatcggttcgcacctggcgggacggttgaccagtgacgggcaccgggtcaccgtgctcgacgatctcagcggcggcagcgcctcccgcgtgcccgcgggcgccgatctgatcgtcggctcggtgaccgacgccgacctggtggaacgggccttcgccgagcaccgcttcgaccgggtcttccacttcgcggccttcgcagccgaagcgatcagccactcggtcaagaagctcaactacggcaccaacgtgatgggcagcatcaacctcatcaacgcgtcgttgcagaccggggtgtcgttcttctgcttcgcctcctcggtcgccgtctacggtcacggtgaaacgccgatgcgagaaacctccatcccggtgccggcggacagctacggcaacgccaagctcgtcatcgagcgcgaactcgaggtgacggcgcggacgcagggccttccgttcaccgccttccgcatgcacaacgtctacggcgagtggcagaacatgcgcgacccgtaccggaacgcggtcgcgatcttcttcaaccagatcctgcgtggcgagccgatcacggtctacggcgacggcggtcaggtgcgggcgttcacgtacgtgggcgacgtcgtggacgtggtgtgccaggcgcccgacgtcgaggaggcctggggccggagcttcaacgtgggcgcggccagcaccaacaccgtgctggagctcgcggaggcggtccgggtggcggccggcgttccggatcatccgatcgtgcacctgcccgcgcgcgacgaggtccgggtggcgtacaccgcgaccgacagcgcccggaaggtcttcggcgactgggcggacaccccgctggcggacggactggcccggaccgccacgtgggcggccggtgtgggaccgacggaactgcgatcgtcgttcgacatcgagatcggcggccatcaggttccggagtgggcgcggcttgtcgaaaagcgcctgggatcggcgcctcgctgacagtggtgaaaacaccagtttcccgcgcgcacccgaacactaggcttggaatccatggaccgtagggagattcagcgtcgcgcgaaggaactcgagccgtgggtgaacggattcgagttcgagggaattcgttatgcggagggctccgaccacggatatntcctcagccaggatccagccgatcgggcccgggcgttctacgaggcgtttcccggtgcgacccggatcctggagctcggtgcgctcgagggtgcggacaccctcgcattggcccgacagcccggcaccagcattctcgggctcgagggtcgcgaggagaatctgcgtcgcgccgagttcgtgatggaggtgcacggtgccaccaatgtggaactgcggatcgccgacgtggagacgctcgacttcgccaccctggggcggttcgacgccgtcctctgcgccggcctgctgtatcacgtccgggagccctgggcgctgctcaaggacgccgcccgggtttccgccgggatctacctgtcgacccactactggggcagttccgacgggctggagacgctggacgggtattccgtcaagcacgtccgtgaggagcacccggagcctcaggcccgcgggctgagcgtggacgtgcgctggttggaccgggcctcgctgttcgcggccctggagaatgccggcttcgtcgagatcgaggtgctgcacgagcgcacgtcggcggaggtctgcgacatcgtcgtggtcggccgtgcccggctgggtgcgcagatccgtcgattccgggaggatggcttcgtcaacgccggtccggtcttcgccgacgacacgatcgcgcggctcaaggccggtgccatcgacctgatctcccgcttcaccgagcacggccacgtctcggacgactactggaactacgacgtcgagaacgaggctccggtgctctaccggatccacaacctggagaagcaggactgggccgaacgcgagctgctgttccgcccggaactggcggagctggccgccgcgttcgtcgggtcaccggtcgtgcccaccgccttcgccctggtcctgaaggagccgaagagggcggcgggcgtcccgtggcaccgcgaccgggccaacgtcgcaccgcacacggtctgcaacctgagcatctgcctggacaccgcaggcccggagaacggctgtctggaaggtgttccgggctcccacctgctgcccgacgacatcgacgtcccggagatccgcgacggtgggccccgagtgcccgtcccgtcgaaggtgggcgacgtgatcgtgcacgatgtccggctcgtgcacggctcgggccccaaccccagcgaccagtggcgccgaaccatcgtcatcgagttcgcgaatcccgcgatctcactgccgagcctcccgtcctgaccggccggacgcggatgccgcctgcggcgaccccaccgggtgcctccgcgaacctgcgcggcccgcgccgcgcacgtgcccacattggccgcggcagatcgactctgccgcggccgatgtcccggccgatccgtccggtgtcccggctcgtcagctagctcttcgacgagagcagcccggtcacgtggtcggcgatggccgtcacggtgggttgctgccagaagacggtggtgggtaggcccagcccgagtcgtttctccagccgacgccggatcaccaccgtcatcacggagtccaggccctgatccgcgagcgggcgcctcggatgcaggtcgtccaccgcgagccgcatctcggtcgcgatctggagacgaacctcctccagcacccgttcccgcagctcggccggcggcaggtcggccagggacatcgccggctccgcggggctcgcctcctcggtgccggccggggcgggcggctcgtcgatcaccgggtagcgcaggccgggcagcgcggccaggacccggccgtccgcggtggccacgagggcgtccaccgtgtcggggcggtcctcgtcgagccgcacctcgacgaggacggtctcgggcggcgggccactcgtcgccacctcgtcgatctgcaccaccatccgcaactgcgggatgccgggaaacgccgccggcgcgatcgacatcaccgcgtccagcaccgacgcccaggtggacgtctcggcggtgtggacgcgggcccggaggacaccgtacccggagagcagctgatccaccgaccaaccgaaaccggtcgacgggacacccacctcagcgagccggcgatggatcgacccggggtcggccggctccagtcggtactgctcggggtccacgagggtccgtcccgtgagcgccgccgcagcaccgtcggccacggtcgcgtcggcgtggaccagccacggcggatcctcgccggcatccccgccggtggcccgggaggcgagccggacggcgtcggcctcctggatgacctggatctcccgcaggtccgccgtcatcagcgggtgccgcatcgccacgtcggccaggaccggtggcacgccgtcccgctcggccgccgccaggaacgtcaccacgagcacggcggcgggcacgatctcgacgccgttgaggctgtggctgcccgggtagggccggttggagtcgtccaggctggtctcccacacccgcaccgcgctccccgccaggctgcgccgcgcaccgagcagggtgtgcgaatcagggtcgtggccgcgccccccgctccgggagaccggggcgggatagtgccagtggctgcggtgccgccaccggtagaccggcagggtgaccagttctcccgacgggtgcagggccgtccagtcgacgggcaccccgatgcagtgcatcccggcgagtgcggtcaggaagccgcgtacctcggactgatcgcggcgaagcgtgacgccgacgtacgcctcgtcgtcggaaccgcccaacgtctcgtggatcgagtgggtgaccaccggatgcggcgacacctccacgaaggcacggaagccatcggcgaacgccgcggtgaccgcggcggcgagccgcacgggctggcgcaggttcccggcccagtaggccccgtcggccgtcatcgccgcacgcgggtcgtccagggcggtggagtagacccggatccgcgggctgtgcggcgtgaagtcgacggcggcggtcagctcgtcgagcagcggatccatgtgcgggctgtggaacgccacgtcggaggccaccctgcgggtcaccagccgctcggcatcccactgggcgatcagcgcatccagggccgagggatcgccggaaaccaccgtcgacgacggcgacgacgcgatggccgccaccacgtcgctgcgaccggccaaccgctcggcgacctcctcgaacggcaacgacaccatggccatcgcgccctggcccgcgacgcgtcgcaggagcgccgatcgccggcagatcaaccggccgccgtcctccaccgtcagcaggccggcggtgaccgcggcggcgatctcaccgacggagtggccgatgacggcgtccggggtcacgccccgcgaccgccacatcgcggccagtcccagctgcatgacgaagatcatcgtctggatccggtcgaccgcgtcgaactcaccgtccagcaacgcctgccgtggcgagaagccgatctcctccaggaagacggcttccagggagtcgaccacccctgcgaacgccggttcggtgacgagtagttcccggcccatccccgcccactgggaaccgtggccggaaaagacccagaggagcttcggagggtccccgagcggcgatcccgtgaccacgccgtcgaccggttcgcccgcggccaggccgcgtagcgcggcaccgagaccgtccgcgtcggcggccacggcgaccgcccggtacgcgagatgcgaacgccgcatcgccagggtgtgtcccacggaggccaggtcggcgtcccgggagagccagccggcgagcgccgacgcctgctcgcccaacgacgccgccgaggacgcggagaccgggaacagggactcaccggtcagcgggctgcgctcccgtcgcgtgcgcggtggggcctgcccgagcacgacgtgggccaccgtcccgccgtacccgaagccggacacgccggcccggcgcggtctcccgcgatcgggccaggactggtgacgggtcaccacgcggacgttcagcgcgtcccaggcgatggccggatcgacgtcggtgacgaccggggtggccggtatctcggcgcggtccagggcgagcaccgccttgatcactccggcgatgcccgcggcgccttccagatggccgatgttggccttgaccgaaccgatcaggcagggctcgccgtcggcgcgagcgtgcccgtacacggcaccgatcgcggcggcctccatcgggtcgccgagcggggtgcccgtgccgtgcgcctcgacgtagtcgaccgagccgggcgctatcccgccgctgcgcagggcccgttccatcacgtgctcctgggcctgcccgcacggggccatgatcccgttggtgcgaccgtcctggttcacggcgctgccgtgcagcaccgccaacacccggtctccgtcgcgctcggcatcggcgaggagcttcagcacgacgacgccgcagccctcgccgcggccgtacccgtcggcggtggcgtcgaaggacttgctccgcccgtccggggccagcgcacccgcggcgccgagagtgatggactggcctggggagacgatgagattgacgccgccgaccagagccaccgtgctctcgcccagccgcaggctctgcgcggcgaggtgcagggccaccagcgaggccgaacacgcggtgtccacggtgagactcggcccccgcaggtccaggacgtgggagacgcggttggagagcgcgcaggcggcggcgccgatcccggtccaggcgtcgatgtacgggaggttctcgagctggtgggcaccgtagtcgtaggtgcaggcaccggcgaagacaccggtgtccgtgccggccagctcgcgcggtgcgatgcccgcgtgttccagggcctgccaggccacctccagcagcagtcgttgctggggatccatcagctcggcctcgcgtggcgagatgccgaagaagtcggcatcgaagccgtcgatctcattcaggaagctgcccgaacggttagcccggcgtacggcgttctcgaactcgggccccaggtcccggtacggctcccatcggctggccggcacttcgccggtggtgttgtgcccgccggcgagcaggtcccagaagccgtccggggaattgacgtcgccggggaaccggcaaccgatgccgatgaccgcgaccgatggagaggcccccgcgagcggcttgattgctttcggttccacgaacatcccctgttgtcgattgcctgaacggacggtcgggcgggcatcgcctcgggcgggttacgccccgcggcgcatcgaggactgccgcgaccgggccggtcgccgcgactccgggcggcgcaccgcgcgtcagactccatatcccatacggcgatccaacgaactctacaaacggtctatatgacagtgatatagaacttctcctagacattttctgacgcgcccccggcagggcctcccgcgaggcgatccggaaccggactcccgcccggtcgtgcgggtgcccggcttgcggtggttggtgtggacgcgccccgggcatgggcggcgggcgacgccgccgatccgatgaccatcggcgaatagggaaagacctagaatccgccggcgagatgtcggatcggcagccgagggctcgatcggtcacgatggaccgtgcgaggatcacgcggatgttgtcgaaggcacgggagtcattgacgatgaccgaatacggtgccatcgcgctggatgtcggtggggtcatctattacgatgagccgttcgagctggcgtggctgcaagcgacgtacgatctgctccgatctgacgacccggcgatcacccggtccgttttcatcgagcatgtcgagcgtttctatcactccccggacgacggagccgcaggccggacgctgttgcattcgccggccgccgcccgagcctgggcgcagattcgccgggcctggcacgaactcgcccaggagatgccgggcgcggtccgggcggcggtgacgctggcccgcgaggtcccgacggtgatcgtcgccaaccagcccccggagtgcgcgcgggtgctggatgcctggggactgacagaggcctgcgcgggcgtcttcctcgattcgctcgtgggcgtcgccaagccggatccggcgctgctgggaatcgccctggaacacctcggtgtcgcccccgccgacctgctggtcgtcggcaaccggcacgaccacgacgtcctgccggcgcgggcgctcggctgcccggtcgccttcgtccgcgcggaccccggctaccggccgccgtccggcgtccaccccgatctgatccgggcgtacacgtcgctccgcgccgtccggaccgcgccgccggccggtgacgacgaacgggtgtccgtcgtcgccacgctggcggccctggctcgttcctcggccacgggcctgcgcccggtcactcgcgccgagtcgtcgtgacggcagcccaggtgaggagatgcccgacggccgtcatcggcgccaccgggttcatcgggtcccggctcgtggcccaactgacccgcgcggggcacccggtcgcccgcttcaaccaggcgcacccgccggtggtcgacgggcgcccggctgccggcctgtgcgacgccgagatcgtactgttcctcgccgcacggttgagcccggcgctcgccgagcgccatccggaactgatcgtcgccgagcgcaggctgctcgtcgacgtcctgacggccctgcggcactccgcccccttcccggtgttcgtactggccagctcaggcggcacggtgtactcgccggacgcgtgcccgccgtacgacgaatcggcgttgaccaggcccacgtcggcgtacgggcgcgccaagctcgggctggaacgcgaactgttgggtcacgccgaccatgtccgtcccgtgatcctgcggctcagtaacgtctatgggcccggccagcgcccggcgcacggctacggcgtgctgtcgcactggctggacgccgcggccaggcggcagccgatccgggtcttcggtgatccggaggtggtccgcgactacgtgcacgtggacgacgtcgccgagatcctcaaggccgtgcaccgccgtacggtcactaccggtccggagggaatcccgaccgtgttgaacgtcggctcaggggcgcccacctccctggccgatctgctcgcggtggtgtcgacagtggtcgaccagcggatcgaggtgatctgggaaggcggtcgccagttcgacagaggtggcaactggctggactcctcgttggcacacgagaccctcggctggcgggccaggatcggtctgacggacggcgtacgtgaatgctgggaacacgtgctcgcgcatcagaccgccgccgagcgatgatcacgcccccacctcagcaggagctgatcatgaaggacgccccacgcggtcacggcaccgtagagacacgccagcggcaggcgcaggcgggactccggcgcggtgcgatgccggtcccattccttccggaaccccgcccacgcctggccacgccgtgactcgcaccgaccctgccagtacgcccgccgcagcaggtagcgcagggtcagccgggcgggatccacgtcgtgggtcacggagcagtccggcaggagttgctcccgggcccccgcgtccttcatgagcttgacgaacgtggtgtcctcgccggactggaggttgccacccgtccggctcaacgcgagatcgaagtcgaggcccttggcatgggcgaaggcggtgtccaccgccatacaggcaccccagatcttgatctcgcggtcgtcccggtgccagccgagcaggtggaactgaccggacgtcacgtaccagggcagggggcgtggtggacgggcgagccgagtgccgacgacgtgggtgcccgcgcgcaggctctcgcggaccgccgtgacggccttggcgtccagccgcacgtcgtcgtcgacgaacatcacgtggtgattcggccaccgggccaacatgagattccgcgaggcggacaggccgccggtggcgccgagaacgcgcatcgttccgccggcggcatccacctcggccgcgaccgactccgcctccggagtgctcggccggtccaactgcacgaagtactcgtcaccggacagttgggccaggttgtggtgtaggtgcttacgcacattctcgacactgaatgcgcatatagccactaccatcggataatcggagggcccttttttcttcgtttccatgagacctcgaatcgtccctgccgatgggtcatggggttgcacgggctggtttccgttccgttcagtcgagcctttcccggcaaacctccgggggccaggtccccaccgaaaggatgcccatcgagtacaccttggcgatgagcgcgggccgattgggcacacgtagccgctgcaacaacttgctgacgtggtattcgacgccctggcggctcaggtagaccttgttcgcgatatgcacggtgcgctcacccgctgcgatgctttcgatgatgcgggcatccaactcggagaggggaagcttcagacccacagtttcatctccaatccctaccatgacttgattcgcaagacgagtcgatggaacggcgcactgcgtcacggtgtcgtcttccaacgcttaagtcaggccgaaccggccgtgaatcagccggacgcaggcgtgctcaacccgatggaggccaccgaaccggcggccggccgacgttacgcggtgctgggtccggacattcggcagaaagcgtcgcgcgaccagcggattccgagacgattggttgccgggtgcggcaagccggcgcagccggttcacccgccatcggagttgacctgaaggtgtcggaaaacctagctgacagtaaacatcccgtagcagtcgcacccccgctttgcctgcgatcgatacgtaggtcatccgtgtggccactcccagaactgacctaacgtggcagtagtgtaaccgaaagttgcacgtatcgcctgccccgatcgggtaaatgatcgacggttgtcgctctctgatcggaattgacccatgcgggtccatcgatgcctgcgttcgggggtacgccctgctccgggccgcgtgcggggtggtccagcggcttggccgcaggggccaccgatggatcgaacgctaccctgagtcgcggagtgacaactatgagctcgtgctgaggcttagtgaaacacctagtctccggggcctggatcgtccattgagctgggtgttttcgccattgatgacccctagagggctaaggcggctttcgagtcgtccgaacgcttcgcccgttctgcggggcccctcaagggggccggcgcgggcctccccggtgcggccgtggtctcgccgcgcctcagacctcgtggggcagccgcacgcgcggttgccctgatttgacccgaatttcatcgatcaggcgagcccgggcgcagatctccaccgtctcggcggcacgctgacccgcgacggcgacggctccgacgaaggcacgcagcgtgttggcgaactgatcctccggcggaagggtcagttcccgcctgacctcctcgtgttccagcctgatgacgggccgtcgcgtggtagggggcgtgtaggcgcgttcgacgacgatccgcccctcgctgccccacagcacatagtccgaccggtacgcgtgctcgaagccgaaggtcaactgggcggtccggccgtccggagtggacagcagggcgctgccggacacgtcgacgccgcgttcggggtccagtttcagcgtcgcgccgacgacctccagctcgggaccgaggaagaggcgggcggcgctcagcggatacatgcccgtgtcgagcagtgccccaccgcccagatccggccggtagcggatgtcgtccgggccgaggggagggaatccgaacgcggcgttgacctcgcgcagttcgccgatctcgccgccctccagcagatccaggaccgcgctgtgcagaccatgccggagaaaggtcagattctccatcagggcgaggccgagggaccgggcggtttccaccatcgccacggtgtgggcgtaccgtgtggtcaacggcttctccaccaggacgtgcttaccggcctcaagcgctcggccgacccattcgtggtgcaacccggcgggcaggggaatatacaccgcgtccacgtccggccggctcagcagcgagcggtaatcggcggccgccgcgcagccgaactggccggcgaacgcacgggccttcgcctgttctcgggccgcgacggcgacgagttcggtcgtcggctcacgcaggatcgccggcagggtccgccgccgtgcgatgtcggcacatcccagtacgccgaaccggatcggatcgttcaccaccgctcgctggggcacctcactcaccacaggctgtgcaggcaggcaagcagactgcgtgcttcgacgttgaggtagtagccgtgccgcagcagcgtggcgagctgatggacggcgacccagcagaaggtgtccggcaccgccggaaggtcgtcgccgacctccaccagcatgtagcggttctcggcgcggtagaaccggccgccctcctccgcgaggacggtgtcgaacaggatccgctcgctcggggcgttgagtatcaggtcgaggaaaggaggccgctgttcggcatccgaactcggcgtgcactggaccgtgggtcccatctccatggcatccagcagccccacctggaaccgagcgtgcaccagcacgtgcgccaccccattgatgatcctgagcgcgaatgcgatgatcccccgctgccgcggatgcagcaacggttgactccactcggtgacctcacggttgttgatgcgtaccgtgaccccgacgatgctgaagtgtcgcccgtcctcgcgggagatctcatacggcgtgtgccgccagccgcgcaggtcgcggagcgagatccggctcaccgccagctcgtgccggctcttggcctcggtgaaccagctcagcaccgcctccgtggagcggtgcgacggaccctcgccgctggcggaccgggccagcgcggcggccatggcggagttcgcggggaccactcccgaaccggcgaagaaggtcgacggcaggcaggacagcacggaacgggtgtccatgttgaccagaacgtcgatgcgcaggagccgccgaacctcgtgcagcggcagccagtagtggtagtcggagggcggcacgtcgtcgaccagcacgaccatgttgcggttccgcttgtgcaggaaccaggagccctgctcggactgcaacacgtcgaccaggacccggccggcgcccggccgggtgaagtattcgagatacctcgtgccgccgcccccgtggacccgcgtgtagttgctgcgggtcgcctgcacggtgggcgacagctgcatcatgttgatgttgcccggctcgaccttcgcctgcaacaggcagtgcgggacgccgtcgacgagcttcatcaacatgccgagaatcccgatctccggctgattgatgatcggctggtaccactccgccaccgcaccgtacgtcgttcgcacgtgcacgccctcgaccacgaagaagcggccgctctcgtgcgccaggttgccggtggtctcgtcgaacgcccaaccacgcagctcgtccagccggatccgctccacctcgcaggaggtcatcgtcgaccgttcggcaagccaggaccggaaggcggggctcaccccgcccgccgccggctcccaccactccatcgggtcatccccggacgtcatgagcttgccctcggacaacgcgggaagctcgctcaccacagatcggccagctcgcgaatgacgccgccctcactgcactgcggacccgacagcagacggagatcgctgtcgaccatcatcccgaccagctcctcgaagtagaccgtcggcttccagccgaggcgctgctgggccttcgtcgcgtcggcgcagagcaggtcgacctcggccggacgctggagcgcctcgtcgaggacgacgtggtcacgccagtccaggtcgacgtgggcgaaggccagctcgaccagctcccgcacgctgtgcgcgatcccggtacccaggacgtagtcgtcaggctcgtcctgggcgagcatcatcgacatgccgcggacgtagtcgccggcgaaaccccagtcccgctcggccatcagattgcccagtcgcaacgagtcccggagccccagtttcacggccgccgcgcccagcgacacctttcgcgtcacgaactccggtccgcggatgggtgattcatggttgaagagcatgccggagaccgcgtacatgccgtacgactcgcggtagttctgcaccgtgtagtggccgaacactttggcgacgccgtacggactgcgtgggtggaagggcgtcagctcattctggggggtctcccgcaccttgccgaacatctcggacgacgaggcctgatagaagcgtggccgactcgggccgggggtacgcgagctggtgatgcctgcgacgatccggacggcttcgagcatgcgcaccacgcccgtcccggtgatctccgcggtggtgttgggctgccgccacgaggtggggacgtaggacagtgcgccgaggttgtagatctcgtccggccgaaccctgtccaccgccgagatcaggctcgactggtccatcaggtcgccgttgacaagccgaacgtcggggtgcacctgccggccgcagcgcgcgctcggcgaattctggccccgcaccattccatagacgtcatatccagcggccaggaggtgccgcgcaagataagtaccgtcctgaccggtaatccctgtgatcagcgctcgcctagtcaggataatctccagcccctgtgaccaaccctcgatgtgatcgcgtcgagggatggcgaactaccgggttgccccgaggaaaggcatgtcccgttgccgtgactcacggtactggaaaatggagcagggatcacccttctcgaatgcaatatagggagctcactagagggtgcagccgtgcgcgaagaaccggcaatccgtactgcttacgggtgggccggcccggcgtcgttgaggtcggccgccacgaacagggccgccgctcgtgtgcccaccctcagttttcgccgggggcgtgccgccccgatcggcggaacccggcggccccgcacgatcaccgcgatcaccgcggccggtcgaagcaccgaagcgacggcggtgagcattccgtgcaggccccgaccggcatgaccgccggtccactccgtctgttcgccgtacgggacgtccgtcacgacgagatccggttcgctgcccccgaccgccgaggccagcgccgtcgggtcgaagacgtcggcctgtcggacggcgtacgggagggggccgccggcagcctcgagccggcggctcagccgtccggccgcggccgcggcctcggcgtagccgggcttgtcgaagcgtcgagcccgctcggtcaactccgcagcccgtgccgccaggccaccctcggcgagcaggccgacattggctgccgccaatgtcagggccgcgtcggcgtcgatgtccgaggccagcagcctcgcgatcgaccgccggtgcagaatcccgagcacggtcagcaggtaaccgctgccgcagcacggatcccacaggaccgccgggtcggtgccgccgcgcacgtcgagggcgtgctggaacacctcggacgcgagccgcacggggaaggcgggaaagcccggggcggaccggagaaccgccccgcttgcaagatcgccgtagtcgtcccgtgtcgtctcgtaccgatagcccaccctgctccgatctctccgcacgccagggtagcaatgggtgtggccggtgccgcagcaccgctacgcacccgccgggaacgagcttgaggccggcccgctcatgcctcgacgtcgcaaccgtcctggtccctgatccactggtaggccctggcgattccctcggcgagggctgtccgtgcggtccagttcaactcccggccggcccgggtcacatcgagggcggaatgctggagctcgccgagacgggcgg

SEQ ID NO: 281 - DNA, 824 bp, Micromonospora carbonacea aurantiaca
gccgtacagccggttgtagagggccacgtactgctccgcgcagtacttggcggcgccgtacggcgccgcaggctccgggcgggcgtcctcgggggacgggatcgcgctgatcgccccgtacagggctccgccggtggaggcgaacaccacccgggccccgacggctcgggccgcctccaggacgttgacggtgccgagcacgttgaccccggtgtcgccgctggcatccgcgaccgaggtgcggacgtcggcctgcgcggcgaggtggtagatcaggtccggacgggcgtccgccacgatcgcggcgagagccttcccgtcggtgatggactcctgatggaaggcgacacggacggccaaccggccgcaccggccggtggagaggtcgtcgaccacggtgacggtgtcgccgcgctccagcagggcgtcgaccaggtgtgagccgatgaagccggcgccacctgtcacgaggacgcgcatggacggggatccgtggcggaagaaggaattgacttcgttggccctgcgataaacagtatcttcacgaggccctccgtgtgtgtccgccgaatgtatatgggaacggctcgccggcacaggccggaaacggccccgcattgaagctcgagtgatacgcctagacttcaccgccaccggctactggagggcctacgctaaccggtgtccacacattcgcgggccgcatgtgcgttggcgtcgttcccgaccgtcagccatgcaatggtggtttcggtcgtgggtaggcgaccagggtcggaatagtgcaaaaggaagcgggcgatggctacagacacagcgaattc

SEQ ID NO: 282 - DNA, 10035 bp, Micromonospora carbonacea aurantiaca
atggtcgacctgctgaccggcgtactcccgcagatccggtcggaggccggtgacaacgaccgggacggcacgttcccggtcgaggtgttcgggcagttggccaagctcggcctgatgggcgcgaccgtgcccaccgcgctcggcgggctcggcgtccaccgcctgtacgacgtcgccgtcgccctgatgcgcctggccgaagcggacgcctccaccgccctggcactgcacgtccagctcagccgcgggctcaccctgacctacgaatggatgcacggctccccgccggtgcgggcgctggccgagcggctgctgcgggcgatggcgacgggggaggccgccgtctgcggggcactgaaggacgcgccgggcgtcctcaccgaactgaccgccgatggttccggcggctggctgctcaacggccgcaagatcctggtcagcatggcgccgatcggtacccacttcttcgtgcacgcccagcgccgggacgccgacggcaacgtggtgctggccgttccggtggtgcggcgcgacgcgcccgggctgaccgtcggcacgcactgggacggcctcgggatgcgggcctccggcaccctcgacgtcagcttccacgactgcccggtcgccgccgaccacgttctcgaccgcgggccggccggcgcgcgccgggacgccgtcctggccgggcagacggtcagctcgatcaccatgctcgggatctacgccggtgtcgcgcaggccgcgcgggacctcgccgtcgagacgtacgcgcgtcgtcgatcgcggccggcggccgccgccctcgccctggtggccggcatcgacacgcggctgtacacgctccgggccgtcgccggcgccgcgctgctcaacgcggacctcctggccgcggacctgaccggcgatctcgacgagcgcgggcgcgggatgatgaccccgttccagtacgcgaagatgaccgtcaacgaactggccccggcggtcgtcgacgactgcctctcgctgctcggcggccaggcgtacgacgggcagcacccgttggcacggctctaccgcgacgtccgggccggtgggttcatgcagccctacagctatgtggatggcgtcgactacctgagcggccaggcgctgggcgcggaccgggacaacgactacatgagcgttcgggcgctccgctccccggatccggcgggagaaaggtgaacatgaccatccgagtgtgggactacctgccggaatacgagaaggaacgggccgacctgctcgacgcggtggagacggtcttcgagtcgggcaacctcgtgctcggccgcagcgtgctcggcttcgagaccgagttcgccgcgtaccacgacgtggcgcactgcgtcacggtggacaacggcaccaacgcgatcaagctggccctgcaggcgttgggcgtggggcccggcgacgaggtggtcaccgtcgccaacacggcggcgccgaccgtgctggcgatcgacgccgtcggcgcgatcccggtcttcgtggacatccggccggacgactacctgatggacacgacccaggtggccgacgtgatcaccccggcgaccaaggctctgctgcccgtccacctctacggccagtgcgtggagatggcgccgttgcagcggctggcccgcgagcacgggctgctggtgctggaggactgcgcgcagtcgcacggcgcacgacacgcagggcaactcgccgggaccatgggcgacgcggcggccttctccttctatccgacgaaggtgctgggcgcctacggtgacggcggcgccgtgctcaccggtagtgagaccgtggaccgtgacctgcgccaactgcgctactacggcatggagagcgtgtactacgtcgtgcagacgcccggccacaacagccggctggacgaggtgcaggcggagattctccggcgcaagctgcgccggctcgacgagtacatcgccggccgccgcgcggtggccgagcgctacgccgccgggctgggcgacatcgccgaggcgaccgggctcgtcctgcccgccctcgccgacgccaacgaacacgtcttctacctctacgtcgtccgtcatccgcagcgggacgcgatcctggagcaactgaagcggcgtggaatcacgctgaacatcagttacccgtggccggtgcacaccatgaccggcttctcgaagctcggctatgccgccggatcgctgccggtcaccgagcggatcgccgacgagatcttctccctgcccatgtatccgtccctgccggtcgacgtgcaggacacggtgataggcgcattgcgcgacgtactcacgacgctctgagccgccggtagcactggaggacgccacccatgatcagcccagccgaccgggcacggccacgagccacctgccgcgcctgcggtggaaccgtcgtgcagttcctcgacctcggccgccagccactgtccgaccgcttcctgaccgaaccggagatcccgcaggagtacttcttccagctcgccgtcggcctctgcgagacgtgcacgatggtgcagctcatgcaggaggtcccccgggagcggatgttccacgaggactacccgtactactcgtccggttccgccgtcatgcagaagcactttgccgacaccgcccggcaactgttggagacggaggccaccggcccggacccgttcgtggtcgagatcggctgcaacgacggggtgatgctgcggaccgtgcacgaggccggcgtccggcacctgggcttcgaaccgtcgggcaaggtcgccgaagcggcaagggccaagggccttcgggtacgcggggacttcttcgaggagtccaccgcccgtgaggtacgcgcgagcgacggccccgcagatgtgatcttcgcggcgaacaccatctgccacatcccgtacctcgactcgatcctgcggggtgtcgacgcgctgctcgggccggacggcgtcttcgtcttcgaggacccctacctgggcgacatcctggcgaagacgtcgttcgaccagatctacgacgagcacttcttcctgttctcggcgcgctccgtgcaggcgttggccgcgtcgttcgggttcgagctggtcgacgtggaccggctggccgtgcacggcggcgaggtccgctacacgctggcccgtgcgggtgcacgccgcccggcggaccgggtggccgcgctgatcgccgaggaggacgcgggcggcgtcgcgacgctggcccggctggaccagttcgctgcccaggtcggccggatccgcgacgacctgcgggcgttgctcgaacggttgacggcggagggcaaacgggtggtggcctacggggcgaccgccaagagcgcgaccgtggcgaacttctgcggcatcgggccggacctggtgtcgcgggtgtacgacacgacgcccgccaaacagggccgcctgaccccgggcacgcacatcccggttcatgcggcggacgagttcccgaccgacccgccggactacgcgctgctcttcgcgtggaaccacgccgacgagatcatggcgaaggagcaggcgttccggcaggccggcggggcctggatcctgtacgttccgcacgttcacgtgcgggattgagtggggccgtgcaggtagcaaccgaactcgccgtcgagggcgcgtacgtcttcaccccgcgggtctttcccgacccgcggggggtcttcgtgtccccgtacctggactcggtcttcaccgagacgctcggatatccgttgtttcccgtggcgcagaccagctacagcgtctcccgccgcggcgtcgtccgcgggctgcactacaccacgacgccgcccggttcggccaagttcgtctcgtgcccgtacggccgggtcctcgacgtggtgctcgacgtccgggtcggatcgccgaccttcgggcgctgggacagcgtggtcctcgactcccagggcttcaggtcgctgtacctgccgacgggggtggcgcacatgttcgtcgccctgatggacgacacggtgatgtcttacctgctctccacggagtacgtcttcgagaacgaacgggcgttgtcaccgctcgacgacacgctcggcctgcccgttcccgccgacatcgagccgatcctgtcggatcgggaccggaccgcgatcaccttcgcccaggcccacgcggccggggtgctcccccggtacgagatctgcgccgagatcgaggcgcgtttcgctcagggaccgcaccgtacggcgtagaccgtgcagaagatccacctgggcgcgccatccggtcacggcggtgaaggcggatgcgtcgaccaccagactgtggaagtcggtctgccgggcactggcgggcggcgcgacggagacgaccggcaccggcggacgccccgtctcctccgcgaccagcgcggcgatcgtccggaaaaggtcaccgaccggttcgccgcggcggctgccgagcggccagtgccggcagacgagcgcatcggcatggtcgagggcggcgacgaaggcgctcgccgcgtcgtccacgtagagcagctctcgctggatggtgccgtcgtgccacatggtcaggggttcgccggcgagcgcgcggcggatcatcgtcgacacgaccccgcggtcgtcgccgccacccgggcgggccggcccgaagacggtgggcaggcgcagcgtgaccccgcggaggatgccatcggcggaggcccggtcgagcagcgcttcggcggccgccttctgccggtcgtatccggtctccgggtggtcgggttcggtcccgtcgacgggcatccgctgcgcccggccgacctgtgacgccgagccggcgaagacgaccacccgtggcccggtcccggcccgcgcaacctcgaccaggtcacggacgacgccgaggttcacccgcgccgcggtgccgtcgccgtcggcgctgcgccacccggcggtgttgagcaccaggttgatcacggcatccgcgccctcgaccgccgccgcgaccgcgcctgtctcggtgaggtcggcggtgaccacctcgaaatccgcggcggccggctccggtgccacagcggatcggcgggacaccgcccggacggtgactgggcggtcggccagcgcggtcaggacggccgagcccacgaaaccggacgcgccgagcaccgcgatcagcgggcggtccgtcatcgcccggcagctccggaccggtacagcgcctgccagtagaagctccacgggacggctctcgcatctgcgagcagcgcccagtcgcggcccggccggtaggcgtcgatgaaccggcgggactgcgccgcgacggcgcggtcgtcgaagatgtccacgatgtccctcagcaggccggtccgcaacgcgagctggacgaccgcgtcgccctgcgagtgcccgtccaggctcttgtcgaggtacttgccgaccgggttgttgacgtagaggtggtcggcatgggtggcgatgaggtccaggtaggcgccgacggtgtccggggtcatctccgcgaacgagtcgatgttgatggccaggtcgaaccggagctcccgcagggcgccgccggcctccgcctggtcgacgccgtgaaagtgcaccttggcaagctgctcgtcggtcagcaccgcgccgaggtagcggctggccaggtcgagcgagttctccagatcgacgatgtggtacgcggcgatctcgtggttggacagcagcgcgtggcaggtccgcccgtagccggcgccgatctccaggatgctcgtaccgtcgagggtcatccggctctcgatgaactccacctcgagcaccgcctgcaggtagtccatgcagaccgcttcgccgtcgtaggtgatcgagaacggatcgccgacctcgcggttggcgatgcggcgcagccgggcccagttggccgggctcaggcccgccgcgagggtgaagacgagcgttttcagatagcgcacaccattgacccgcgggtcccagagcgccagcttgtagttgacctcgctggacttgaagttgctcaggtcgccgacggcctccctggtgacctgggtgttgttgtagagctcccagagcgggctgcggccgtacgtctggctcatgtgccccccccgcgccgatcgaatcactcgatggtgaccgtaccggctatttactagcggttcgcctagagccaccgttcaagatcacggtgacaggggctcgcctaccccgcgcgtcgccggccgtacgcccccactcgcggggcgcaccggccggcgacgctgtcgtcgttacggggtcacggagagcaggtgggccttgtagccctcaccgtaggtgctggtcggggtgccgttgtagtcctggatgaggacgttgccgccgctgcatccccacgggttccaggtccacgccgtgtagccgatccgcttggagtccagccaggtcatcacctggtcgatgtagtcgtgggcgcaggtgtcctggccgatctcgccggcgtgcaccggcacctgcgcggcgacggcgccgatctggctgtcccagcaggaggcggtgacgcaggcgttgaagttgtacgagtgccacgacgccacgatgttgccgagcgggtcgttcggcttgtaggtgagccactggctcaggtcgttggtccaggtcaggccggcgaccagcaggacgttgctggcaccggtggcccggacggcgtcgaccaggtcctgcatgccggcgacctcgtaggtgatgccggtgcaggtgccgccgtcgcgcaggcagcgccacgcggcagccatgtccgaccagttgttggcggcgtccgggtagggctcgttgaacaggtcgaacaccacggcgtcgttgcccttgaaggcgttggcgacgccggtccagaactgcggagtgtgctgcatgctgggcatcggcttctggcaggtggcgttgacgtcggcgcaggcggagatgttgccggtgtactgcccgtgggtccagtgcaggtcgaggatcgggttgatcccgttggccacgagcaggttcacgtagtccttgacggcctgctggtacgtcgcgccgctgggcgagccggagaggccgagccagcagtcctcgttgagcgggatccgcacggcgcggatgttccacgccttcatggcgttgaccgaggcctggtcgacggggccgctgtcccacatgcccttgccctgcacgcaggcgaactcaccgctggcccggttgactccgagcagccggtaggtcgccccgctcgccgtcaccagccggttgccggagaccttcagcgcgggcgcggccccggtcggcggcggggtcgtgggtgggggagtggtgggcggtggggtcgtgggcgggggagtggtgggcggcggggtcgtcggcggcggggtggtggtcggctccggggtcggcgaggtcaccgagccggtgcaggtcgtgccgttgagcgcgaacgacttcggcacggggttgctgccgctccacgagccgttgaagccgatcgtggtcgatccgcccgtgcccagcgatccgttccagctcaggctggcggccgagacgctcgtgccggactgcgaccaggtggcgctccagccctgggtgacctgctggccgctggtcgggaagtcgaaggtcagcgtccagccggtgagggcggagccgaggttggtgatggcgacgttcccgctgaacccgcctgtccactggctctgcacggtgtatgccacggagcagccggtggccgcggccgaggcggggaaggtgagcccggccaggccggcggcgaccagggtcgcggtggtgccgacggccagcagggcatgacgatgtctcatctgatctcctcgtggtcgagaggggatcgtcgatgggagcgcatcgaagagctttgtttatttacctcactaagtcaagctgacgtccggccctgcttcccggccggcgcggggccggtggtgtgccgggcgatcaccgtctcggtggggcaccaccgttcccggaccggctcgccgtcgagcagggcgagcacggaggcggccaccagcgcgccgaactcgtgcacgtcgaggctcatcgtggtgagctgcggggaggacaggcggcacaggctggagtcgtcccaggcgagcatgctcaggtcgcgggggaccgccaggcccagctccctggccacctccaggccgccgaccgccatcaggtcgttgtcgtagatgatcgcgctgggcgggtcgccgtcgcgcaacagccggacggtcgccgccgcgcccgactcctccgagtagtcgccggtcaggaccacggcgtcgatgccggccggggcggcggcggccagcaacgcggccgtgcgggtgcgggtgtgccgcaggctgtcgggcccgctgatccgcgcgatccggcggtgcccgaggccggccaggtgcgcgaccgccgcccgtaccgagccgacgtcgtcgcgccgcacggccggggtgtcgccggctggctcgccggccacgaccacggggaggcccaggtcgcgcaggaccgccggccgggggtccgcggcggtcgggttcaccagcaccacggcctcggccagccggagctgtgcccaccggcggtaggcggcgatctcggcggcgtggtcggcgacgatgtgcagcagcaccgaccggccgtgctcggcgagacgttcctcgatgccggagatgaactccatgaagaacggctcggcgccgagcaggcggggcgcccgggcgagcaccaggccgaccgcgctcgtcgtgctcattccgcccccatcacaggtcagcgggccgatccgggcagcggcgcgaactccccgtcgaggctctccgacacccggagcccgcggtggaacgggaccagctcggactccaggaccagggcggcggccccgacggcggacgcggtggcggcggaccgggacagccgtacgtcgacggggtgcgcggagcgggagaacaccgtgtgcagctcctggcggagcacgggcaggtagaccgagccggcgacggcgaagcccggcccggtcagcacgatgacctccaggtccatcacgttggccagggtgcgggcggccgccgcgacgtaccgcgcggacctctcgcacagcgccagggcccgctgctccccgcgccgggcggcgcggccgatcgcggcgaagtcgcgggccaccgccgcggggccggcgccggtcgtgaggccgagcgcccgggccaggccggcgtccgcccgccccgccgcgaccacggcggcgggcccggcgacggcctccacgcacccccgcgcgccgcaccagcagggcgggccgtccgcggccacgcagacgtgccccagctcgccggcgttgccactcggtccgcgataggtgatcccgtcgatgaccagcccggcgccgaggccgctgcccatgtagagggcggcggcggcgctcgccgtgccgaacccgcccgcccagtgttcgcccagggcggcggctgtggcgtcgttgtccagcaccaccggcagctcggtcgcctgctccagcgccgcgccgagcgggaactcccgccagtgccgcagctcggggttcaggccggcgaccccccggccggtgagcgggccggggaagaccagccccaccccgaccaaccgggcccggtccacgccgacgctgtcgaccagggtcggtatctcggccgcgatccgggagacgaccgtcgcgggcgcctcgacgccgacgccgggccgggagatccgggccaccacgatcccggtcagatcggtcaggacgtacgtcatgacgccctggccgaggcacacgcccaccgcgtaccgggaggtgtggttgagccggagcaggacccgccgttttccgccggtcgactcggcgtggccggtctcgacgaccaggccctcgtcgatgagcttgcggacgaggttggaaatggtgggcgcagtgaagccggtcacgctgatcaggcccacccggctgatcgtgccggctgcccggatggcgtccagcaccgcggccttgctgctcgcgtgcggcagcttgtccgccctcggtccgctcac
